(19) United States
(12) Patent Application Publication
(10) Pub. No.: US 2013/0143210 A1
(43) Pub. Date: Jun. 6, 2013

(54) METHOD FOR THE PROGNOSIS OF OVARIAN CARCINOMA

(71) Applicants: Fabian Model, Penzberg (DE); Tamas Rujan, Lorrach (DE); Tobias Mayr, Berlin (DE); Andre Rosenthal, Ludwigsfelde (DE)

(72) Inventors: Fabian Model, Penzberg (DE); Tamas Rujan, Lorrach (DE); Tobias Mayr, Berlin (DE); Andre Rosenthal, Ludwigsfelde (DE)

(21) Appl. No.: 13/503,798

(22) PCT Filed: Oct. 28, 2010
(86) PCT No.: PCT/EP2010/066413

§ 371 Date: Apr. 26, 2012

(30) Foreign Application Priority Data
Oct. 28, 2009 (EP) 09075479.7

(51) Int. Cl. C12Q 1/68

(52) U.S. Cl. CPC C12Q 1/68
USPC 435/6.11; 536/23.1

(57) ABSTRACT

The invention relates to a method for determining prognosis of subjects with ovarian carcinoma using a biological sample comprising genomic tumor DNA isolated from the subject. According to the invention, the method comprises the steps of: determining the methylation status of a CpG dinucleotide in a target sequence that is selected from the group consisting of the target sequences as referred to by name in Table 1 in a biological sample isolated from a subject; and deducing from the determined methylation status of the target sequence the prognosis of subject with ovarian carcinoma. The improved prognosis determination of the subject with ovarian carcinoma enables the improved treatment of the said patient.

[0001] The present invention relates to genomic DNA sequences wherein CpG methylation patterns correlate with time to progression of a disease status. Particular embodiments provide methods, nucleic acids and kits useful for predicting the prognosis of ovarian carcinomas.

### BACKGROUND

[0002] DNA Methylation.

[0003] The etiology of pathogenic states is known to involve modified methylation patterns of individual genes or of the genome. 5-methylcytosine, in the context of CpG dinucleotide sequences, is the most frequent covalently modified base in the DNA of eukaryotic cells, and plays a role in the regulation of transcription, genetic imprinting, and tumorigenesis. The identification and quantification of 5-methylcytosine sites in a specific specimen, or between or among a plurality of specimens, is thus of considerable interest, not only in research, but particularly for the molecular diagnoses of various diseases.

[0004] Correlation of Aberrant DNA Methylation with Cancer.

[0005] Aberrant DNA methylation within CpG “islands” is characterized by hyper- or hypomethylation of CpG dinucleotide sequences leading to abrogation or overexpression of a broad spectrum of genes, and is among the earliest and most common alterations found in, and correlated with human malignancies. Additionally, abnormal methylation has been shown to occur in CpG-rich regulatory elements in intronic and coding parts of genes for certain tumors. In ovarian carcinoma, for example, aberrant DNA methylation constitutes one of the most prominent alterations and inactivates tumor suppressor genes such as ARH1, RASSF1A and DNA mismatch repair genes such as BRCA1 (Hennessy B T et al. Ovarian cancer: homeobox genes, autocrine/paracrine growth, and kinase signaling. Int J Biochem Cell Biol. 2006; 38(9):1450-6).

[0006] In contrast to the specific hypermethylation of tumor suppressor genes, an overall hypomethylation of DNA can be observed in tumor cells. This decrease in global methylation can be detected early, far before the development of a recognizable tumor. A correlation between hypomethylation and increased gene expression has been determined for many oncogenes.

[0007] Ovarian Carcinoma.

[0008] Ovarian cancer is the fifth most common cancer in women and the leading cause of death from gynecological cancers. It is estimated that approximately 21,650 new cases will be diagnosed 2008 in the US, with 15,520 of the women dying from this disease, corresponding to 6% of all cancer deaths. Worldwide there are more than 200,000 new cases of ovarian carcinoma each year. Studies in Europe and the US show that the average five-year survival rate is between 35% and 45%. As for most cancers, incidence is highest for women older than 60. Younger women are affected more often when a predisposition for the disease is inherited, such as by mutations in the BRCA1/2 or HPNCC genes. By far the most common cancers of the ovaries constitute adenocarcinomas of epithelial origin with serous, clear cell, endometrioid or mucous histological subtypes.

[0009] Treatment of most epithelial ovarian carcinomas consists of surgical removal of as much cancerous tissue as possible (debulking), both ovaries (bilateral salpingo oophorectomy) and the uterus (hysterectomy), followed by a first line combination chemotherapy with platinum typically carboplatin (sometimes cisplatin) and another agent, typically a taxane like paclitaxel.

[0010] Prognosis and Treatment of Ovarian Cancer.

[0011] Survival of ovarian cancer patients is influenced by several factors. The most significant independent prognostic factor is the stage of the disease when initially diagnosed. Ovarian cancer staging is by the FIGO staging system and uses information obtained after surgery, which can include a total abdominal hysterectomy, removal of (usually) both ovaries and fallopian tubes, (usually) the omentum, and pelvic (peritoneal) washings for cytopathology. The AJCC stage is the same as the FIGO stage. The AJCC staging system describes the extent of the primary Tumor (T), the absence or presence of metastasis to nearby lymph Nodes (N), and the absence or presence of distant Metastasis (M).

### Stage I—Limited to One or Both Ovaries

[0012] IA—involves one ovary; capsule intact; no tumor on ovarian surface; no malignant cells in ascites or peritoneal washings
[0013] IB—involves both ovaries; capsule intact; no tumor on ovarian surface; negative washings
[0014] IC—tumor limited to ovaries with any of the following: capsule ruptured, tumor on ovarian surface, positive washings

### Stage II—Pelvic Extension or Implants

[0015] IIA—extension or implants onto uterus or fallopian tube; negative washings
[0016] IIB—extension or implants onto other pelvic structures; negative washings
[0017] IIC—pelvic extension or implants with positive peritoneal washings
   Stage III—Microscopic Peritoneal Implants Outside of the Pelvis; or Limited to the Pelvis with Extension to the Small Bowel or Omentum
[0018] IIIA—microscopic peritoneal metastases beyond pelvis
[0019] IIIB—macroscopic peritoneal metastases beyond pelvis less than 2 cm in size
[0020] IIIC—peritoneal metastases beyond pelvis >2 cm or lymph node metastases

### Stage IV—Distant Metastases to the Liver or Outside the Peritoneal Cavity

[0021] More than 90% survive longer than 5 years, when the disease is diagnosed while still confined to the ovaries. With regional metastases, the five-year survival is at 70%, while disease that is detected with distant metastasis shows a 25% 5-year-survival rate. A further independent and important prognostic factor is the success of the debulking surgery (i.e., the amount of residual disease)—a factor that cannot be altered by analytical approaches. Another important prognostic factor is the histopathological subtype. There are several histological subtypes including serous, endrometroid, mucinous, clear cell and papillary. However, most of the ovarian epithelial carcinomas are of the serous subtype.

[0022] The most significant secondary prognostic factor is the response rate to the first line platinum treatment.

[0023] The treatment of ovarian cancer patients today is mostly done without taking prognostic or predictive factors into account. The only exception is stage 1 ovarian cancer (15% of the ovarian cancer cases) where stage and grade of the disease, the histopathologic type, and the patient's age and overall health are used for treatment decision.

[0024] In all events, after surgical cytoreduction of the ovaries, standard first line treatment consists of a platinum and taxane combination that shows the best clinical survival data.

[0025] Unfortunately, ovarian cancer has a high recurrence rate. The 2^{nd} line treatment of recurrent cancer is particularly challenging. Current chemotherapeutic treatment at this stage hinges on one decisive point, the platinum-resistance of the tumor. Currently—and insufficiently—platinum-resistance is determined on the basis of clinically determined disease free survival (DFS) after the preceding chemotherapy. Patients with early recurrences after 1^{st} line therapy with carboplatin and paclitaxel or cisplatin and paclitaxel (recurrence occurs within 6 or 12 months after completion of 1^{st} line chemotherapy) are generally not treated in 2^{nd} line with platinum derivates since response rates are less than 25%. Patients with a longer time lapse between initial chemotherapy and recurrence (recurrence occurs after 6 or 12 months of the completion of 1^{st} line therapy) are treated repeatedly with platinum combination therapies as 2^{nd} line, 3^{rd} line therapies.

[0026] Standard regimen for recurrent platinum-sensitive disease is carboplatin and paclitaxel, or carboplatin and gemcitabine. Generally, about 25%, 33%, and 60% respond to subsequent platinum-based treatment when the time between last chemotherapy and relapse is 6-12 months, 12-24 months, and greater than 24 months respectively.

### Biological Rational for DNA Methylation Based Biomarkers for Prognosis of Ovarian Carcinoma.

[0027] Current research indicates that DNA methylation plays a key role in chemotherapy resistance of ovarian cancer and is therefore suitable for predicting therapy outcome. In the literature, the expression or DNA methylation of the following genes was described to show correlation with treatment outcome (see details below): BRCA/FANCF pathway, ERCC5, EGFR/HER2-neu, and IGF-II.

[0028] In addition, genome-wide DNA methylation analyses revealed a correlation between the total number of hypermethylated gene promoters and increased drug resistance (Meng Li et al, Integrative analysis of DNA methylation and gene expression reveals specific signaling pathways associated with platinum resistance in ovarian cancer, BMC Medical Genomics 2009, 2:34 and George S Watts et al, DNA methylation changes in ovarian cancer are cumulative with disease progression and identify tumor stage, BMC Medical Genomics 2008, 1:47). These studies showed that genome-wide microarray approaches can be utilized to identify and characterize novel DNA methylation markers for predicting the prognosis of ovarian cancer (also: Susan H. Wei et al, Prognostic DNA Methylation Biomarkers in Ovarian Cancer, Clin Cancer Res 2006; 12(9))

[0029] BRCA/FANCF Pathway.

[0030] Women with a mutation (abnormal change) in either the BRCA1 or BRCA2 genes have a significantly increased risk of getting ovarian and breast cancer. For BRCA associated, inherited tumors, it is assumed that the alleles of BRCA1 and BRCA2 are inactivated before tumor development occurs. BRCA1 and BRCA2 are believed to take part in a common pathway involved in maintenance of genomic integrity in cells. Both BRCA proteins have been implicated in important cellular functions, including embryonic development, DNA damage repair, and transcriptional regulation (see Scully and Livingston, Nature 408:429-432, 2000; Zheng et al., Oncogene 19:6159-6175, 2000; Welsh et al., Trends. Genet. 16:69-74, 2000; and MacLachlan et al., J. Biol. Chem. 275:2777-2785, 2000). BRCA1 and BRCA2 have each been implicated in defective homologous recombination DNA repair (see Arvanitis et al., International Journal of Molecular Medicine 10:55-63, 2002), and it is believed that each may be a positive regulator of homologous recombination, with BRCA2 potentially interacting with Rad51, a central homologous recombination effector protein, and BRCA1 regulating GADD45, a DNA damage response gene.

[0031] The described genetic defects make women more susceptible to cancer development in these tissues. By age 70, approximately one-half of all women with inherited BRCA1 mutations will get breast and/or ovarian cancer; women with BRCA2 mutations have a comparable risk of breast cancer. Although, women with BRCA mutation show a high probability of getting ovarian cancer they are hypersensitive to platinum based treatment and have a higher chance of overall survival (see Veronesi A et al., BMC Cancer. 5:70, 2005 and Majdak EJ et. al., Cancer. 104(5):1004-12, 2005).

[0032] Recent research results show that another mechanism exists for the deactivation of the BRCA genes. In a significant number of sporadic ovarian cancer patients (appr. 12%; see Boyd J. Oncology. 12:399-406, 1998), hypermethylation of the BRCA1 promotor region was observed, causing the gene to be switched off. Clinical studies showed that there is a significant difference in time to progression and overall survival between the two different mechanisms of BRCA deactivation. While patients with BRCA mutation had a median progression free survival of 39.5 months (overall survival 78.6 months), the patients with BRCA methylation had a median progression free survival of 9.8 months (overall survival 35.6 months) (see “BRCA1 promoter methylation predicts adverse ovarian cancer prognosis.” Chiang J W et. al., Gynecol Oncol. 101(3):403-10, 2006).

[0033] The mechanism of this phenomenon may be explained the following way. Platinum compounds react with DNA to form adducts leading to the inhibition of DNA replication and transcription, an event essential for its cytotoxic activity. The activity of DNA repair pathways may reverse the effect of platinum compounds, enabling the tumor cell to replicate. While the mutation of the BRCA gene irreversibly silences the repair enzyme, the methylation of the promoter of the gene is a reversible mechanism. The treatment of the cancer cells with platinum compounds puts the cells under selective pressure, enabling those cells to survive that have an unmethylated, ergo functional BRCA repair gene.

[0034] Olopade and Wei (in: FANCF methylation contributes to chemoselectivity in ovarian cancer. Cancer Cell. 3(5):417-20, 2003) describe a model of ovarian cancer tumor progression implicates aberrant FANCF promoter methylation that is associated with gene silencing and disruption of the Fanconi-anemia-BRCA pathway. Disruption of the pathway occurs de novo in ovarian cancers and may contribute to selective sensitivity to platinum salts. Similarly D'Andrea (in D'Andrea AD. The Fanconi Anemia/BRCA signalling pathway: disruption in cisplatin-sensitive ovarian cancers. Cell Cycle. 2(4):290-2, 2003) describes that ovarian tumors often exhibit chromosome instability and hypersensitivity to the chemotherapeutic agent cisplatin. This cellular phenotype may result from an acquired disruption of the Fanconi Anemia/BRCA from methylation and silencing of one of the FA genes (FANCF). The serial inactivation and reactivation of the FA/BRCA pathway is described as having important implications for the diagnosis and treatment of ovarian cancers and related cancers. Both these papers describe FANCF methylation.

[0035] ERCC5.

[0036] ERCC5 is, similar to the genes of the FANCF/BRCA pathway, involved in DNA repair mechanisms. The gene encodes an XPG protein and is key member of the nucleotide excision pathway, the DNA repair mechanism responsible for removing bulky DNA adducts. Similar to the hypothesis described above for BRCA and other genes involved in DNA repair mechanisms, the loss of XPG function is thought to correlate with diminished ability to repair platinum-induced DNA damage, enhancing platinum sensitivity, and prolonging disease free survival. Christine S. Walsh et al. show (Christine S. Walsh et. al. ERCC5 Is a Novel Biomarker of Ovarian Cancer Prognosis, J Clin Oncol 26:2952-2958) on 90 ovarian cancer patients a statistically significant correlation between ERCC5 gene expression and progression-free survival.

[0037] EGFR/HER2.

[0038] EGFR and HER-2/neu are the most frequently studied molecular biological parameters in epithelial ovarian cancer. The results of these studies were extremely heterogeneous. de Graeff P et al performed a meta analysis of the studies (de Graeff P et al Modest effect of p53, EGFR and HER-2/neu on prognosis in epithelial ovarian cancer: a meta-analysis, Br J. Cancer. 2009 Jul. 7; 101(1):149-59) and concluded that the genes have only a small effect on progression-free survival of ovarian cancer patients and may not be useful for introduction into clinical routine. The hazard ratio for EGFR and HER-2/neu was estimated to be 1.67 and 1.65, respectively.

[0039] IGF-II.

[0040] The insulin-like growth factor-II (IGF-II) gene has four promoters that produce distinct transcripts which vary by tissue type and developmental stage. Dysregulation of normal promoter usage has been shown to occur in cancer; DNA methylation regulates promoter use. Beeghly A C et al measured the DNA methylation of the IGF-II promoter region on 215 ovarian cancer samples and showed a statistically significant correlation between progression-free survival and the methylation rate of at least one region of the IGF-II promoter (Beeghly A C et al, IGF-II promoter methylation and ovarian cancer prognosis. J Cancer Res Clin Oncol. 2007 October; 133(10):713-23). Beeghly et al. also showed that the methylation rate varies at the different regions of the promoter and that this variation may have biologic implications relating to different clinical features.

[0041] Pronounced Need in the Art.

[0042] Today, most patients with ovarian cancer are diagnosed with advanced disease (FIGO III and FIGO IV) and will be treated with debulking surgery followed by standard 1^{st} line chemotherapy with carboplatin and paclitaxel or cisplatin and paclitaxel. Prognostic biomarkers based on gene mutations, RNA expression classifiers or methylation markers are not taken into account for therapy decision making. Prognostic molecular markers (biomarkers) that would stratify patients with ovarian cancer into platinum resistant or platinum sensitive patients would enable physicians to use more aggressive therapies e.g. triplet therapies for platinum-resistant patients with poor prognosis, while platinum-sensitive patients could receive standard combinations with carboplatin and paclitaxel or monotherapy of carboplatin or cisplatin.

[0043] Biomarkers that can predict either prognosis or response to chemotherapy (the latter being a prognosis after chemotherapy) of individual patients with primary ovarian cancer would enable physicians to better select optimal drug combinations for treatment of primary and recurrent tumors. In particular the prediction of platinum resistance in patients with primary ovarian cancer would enable alternative treatments even in the adjuvant setting. Today, a variety of alternative drugs are available, e.g., taxol inhibits microtubuli formation, gemcitabine inhibits DNA replication, topotecan inhibits the topoisomerase function, doxorubicin functions as antibiotic. In addition, targeted drugs like erlotinib (Tarceva) that block the receptor thyrosine kinase domain of the EGFR (HER1) receptor or bevazicumab (Avastin) that binds the VEGF-A ligand and thus inhibit signaling through the VGFR2(KDR) receptor pathway open new treatment options in combination with standard drugs. Since all these drugs act along different cellular mechanisms they should not display cross-resistances and should be considered as addition to standard chemotherapy, either as third active compound or as maintenance therapy after adjuvant therapy with platinum and taxol.

### DEFINITIONS

[0044] The term “methylation status” refers to whether a given cytosine residue in a CpG dinucleotide of a genomic nucleic acid is methylated or unmethylated. The term can also refer to a plurality of CpG dinucleotides within a given genomic nucleic acid.

[0045] The term “prognosis” shall be taken to mean a prediction of the likely progression of the disease, in particular response to treatment, aggressiveness and metastatic potential of a tumor. Prognosis may be measured by any variables commonly used in the field, but is most preferably measured by patient survival times.

[0046] The term “aggressiveness” is taken to mean one or more of high likelihood of relapse post surgery; below average or below median patient survival; below average or below median disease free survival; below average or below median relapse-free survival; above average tumor-related complications; fast progression of tumor or metastases. Indicators of tumor aggressiveness standard in the art include but are not limited to, tumor stage, tumor grade, nodal status and survival.

[0047] The term “survival” shall be taken to include all of the following: survival until mortality, also known as overall survival (wherein said mortality may be either irrespective of cause or tumor related); “recurrence-free survival” (wherein the term recurrence shall include both localized and distant recurrence); metastasis free survival; disease free survival (wherein the term disease shall include cancer and diseases associated therewith). The length of said survival may be calculated by reference to a defined start point (e.g. time of diagnosis, time of surgery or start of treatment) and end point (e.g. death, recurrence or metastasis).

[0048] The term “bisulfite reagent” refers to a reagent comprising bisulfite, disulfite, hydrogen sulfite or combinations thereof, useful as disclosed herein to distinguish between methylated and unmethylated CpG dinucleotide sequences.

[0049] The term “Methylation assay” refers to any assay for determining the methylation state of one or more CpG dinucleotide sequences within a sequence of DNA.

[0050] The term “MethyLight™” refers to the art-recognized fluorescence-based real-time PCR technique described by Eads et al., Cancer Res. 59:2302-2306, 1999.

[0051] The term “HeavyMethyl™” assay, in the embodiment thereof implemented herein, refers to an assay, wherein methylation specific blocking probes (also referred to herein as blockers) covering CpG positions between, or covered by the amplification primers enable methylation-specific selective amplification of a nucleic acid sample.

[0052] The term “HeavyMethyl™ MethyLight™” assay, in the embodiment thereof implemented herein, refers to a HeavyMethyl™ MethyLight™ assay, which is a variation of the MethyLight™ assay, wherein the MethyLight™ assay is combined with methylation specific blocking probes covering CpG positions between the amplification primers.

[0053] The term “Ms-SNuPE” (Methylation-sensitive Single Nucleotide Primer Extension) refers to the art-recognized assay described by Gonzalgo & Jones, Nucleic Acids Res. 25:2529-2531, 1997.

[0054] The term “MSP” (Methylation-specific PCR) refers to the art-recognized methylation assay described by Herman et al. Proc. Natl. Acad. Sci. USA 93:9821-9826, 1996, and by U.S. Pat. No. 5,786,146.

[0055] The term “COBRA” (Combined Bisulfite Restriction Analysis) refers to the art-recognized methylation assay described by Xiong & Laird, Nucleic Acids Res. 25:2532-2534, 1997.

[0056] The term “hybridization” is to be understood as a bond of an oligonucleotide to a complementary sequence along the lines of the Watson-Crick base pairings in the sample DNA, forming a duplex structure.

[0057] “Stringent hybridization conditions,” as defined herein, involve hybridizing at 68° C. in 5×SSC/5×Denhardt's solution/1.0% SDS, and washing in 0.2×SSC/0.1% SDS at room temperature, or involve the art-recognized equivalent thereof (e.g., conditions in which a hybridization is carried out at 60° C. in 2.5×SSC buffer, followed by several washing steps at 37° C. in a low buffer concentration, and remains stable). Moderately stringent conditions, as defined herein, involve including washing in 3×SSC at 42° C., or the art-recognized equivalent thereof. The parameters of salt concentration and temperature can be varied to achieve the optimal level of identity between the probe and the target nucleic acid. Guidance regarding such conditions is available in the art, for example, by Sambrook et al., 1989, Molecular Cloning, A Laboratory Manual, Cold Spring Harbor Press, N.Y.; and Ausubel et al. (eds.), 1995, Current Protocols in Molecular Biology, (John Wiley & Sons, N.Y.) at Unit 2.10.

[0058] The terms “methylation-specific restriction enzymes” or “methylation-sensitive restriction enzymes” shall be taken to mean an enzyme that selectively digests a nucleic acid dependant on the methylation state of its recognition site. Preferred are methylation-specific restriction enzymes, the recognition sequence of which comprises a CG dinucleotide.

[0059] Any reference to a gene by name shall be taken to include all transcript variants thereof and all promoter and regulatory elements thereof.

### DESCRIPTION OF THE INVENTION

[0060] The present invention provides methods, nucleic acids and kits for prognosis of individual subjects (patients) with ovarian carcinoma. Said method comprises determining the methylation status of at least one target nucleic acid selected from the group consisting of the genes as referred to by name in Table 1 in a biological sample, preferably tissue or blood, isolated from said subject. The target nucleic acid is also referred to as a “marker” herein.

[0061] Specifically, the invention refers to a method for prognosis of a subject with ovarian carcinoma on the basis of a biological sample, preferably tissue or blood, that is isolated from the subject and that contains genomic DNA from the carcinoma. The method comprises at least the following steps:

[0062] Firstly, the methylation status of at least one CpG dinucleotide in a target sequence, i.e. in a gene or DNA portion, is determined that is selected from the group consisting of the target sequences as referred to by gene name in Table 1, preferably in CLK3, in a biological sample, preferably tissue or blood, isolated from a subject. It is preferred that the target sequence is a target sequence as listed with SEQ ID NOs 1, 6, 11, . . . , 550 in table 1, which are all genomic sequences.

[0063] Secondly, from the determined methylation status of the target sequence, the prognosis of the subject with ovarian cancer is deduced. This deduction takes place, depending on the target sequence used, on the basis of the methylation status, i.e. an upmethylation or a downmethylation that was determined for the target sequence, as will be explained in detail below.

[0064] When the methylation status of more than one CpG dinucleotide is determined, the determination can be performed on CpG dinucleotides that are located either within the same target sequence or within at least two target sequences selected form the group consisting of the genomic sequences as provided in Table 1.

[0065] It is preferred that the methylation status of at least 2, 3, 4, 5, 6, 7, 8, 9, 10, 11, 12, 13, 14, 15, or up to 25 CpG dinucleotides are determined together, preferably of one gene, for determining the prognosis of the subject with ovarian cancer. As pointed out above, the CpG dinucleotides can be located within one target sequence or several target sequences, depending on the number of CpG dinucleotides that are being determined.

[0066] The biological sample is preferably selected from the group consisting of ovarian cancer tissue, ovarian tissue, peritoneal tissue, lymph node tissue, fallopian tube tissue, blood, serum, plasma, and peritoneal cavity fluid and combinations thereof. It is preferred that the biological sample stems from ovarian cancer tissue, as this allows the most accurate characterization of the disease.

[0067] Specifically, the method preferably comprises isolating genomic DNA from a tumor tissue specimens or blood sample that was obtained from the subject. The subject preferably is a human patient with ovarian cancer.

[0068] Preferably, determining the methylation status comprises treating the genomic DNA or a fragment thereof with a chemical reagent or an enzyme containing solution, whereby the base pairing behavior of methylated cytosine bases and/or unmethylated cytosine bases of the nucleic acid are altered such that methylated cytosine bases become distinguishable from unmethylated cytosine bases. This allows for an analysis of the methylation status of the target sequence using common DNA analysis techniques, such as amplification techniques like PCR. The preferred chemical reagent is bisulfite.

[0069] Accordingly, the determination of the methylation status of the method preferably comprises amplifying the treated DNA or selected fragments thereof by means of methylation specific primers and/or blocking oligonucleotides. Most preferred, the presence or absence of the amplicons by means of a real-time detection probe is determined.

[0070] The invention also refers to a nucleic acid for use in determining of prognosis of ovarian carcinoma in a subject using a biological sample isolated from the subject, or to the use of a nucleic acid for determining prognosis of ovarian carcinoma in a subject using a biological sample isolated from the subject, wherein the nucleic acid is chosen from the group of nucleic acids with the SEQ ID NOs 1 to 550. The invention also refers to the use of such nucleic acids in medicine.

[0071] Further, the invention refers to the use of a nucleic acid for determining prognosis of ovarian carcinoma in a subject, wherein the nucleic acid comprises at least 16 contiguous nucleotides of a sequence selected from the group consisting of the bisulfite sequences of Table 1, and sequences complementary thereto.

[0072] Further, the invention refers to a nucleic acid for determining prognosis of ovarian carcinoma in a subject that comprises at least 50, preferably 60, 70, or 80 contiguous nucleotides of a sequence selected from the group consisting of the bisulfite sequences as provided in Table 1, and sequences complementary thereto. The use of such nucleic acids for detecting ovarian cancer in a subject is another aspect of the invention.

[0073] In one aspect, the invention provides a method comprising the following steps: i) contacting genomic DNA isolated from a biological sample obtained from the subject with at least one reagent, or series of reagents that distinguishes between methylated and non-methylated CpG dinucleotides within at least one target region of the genomic DNA, wherein the nucleotide sequence of said target region comprises at least one CpG dinucleotide sequence from the group consisting of the genes as referred to by name in Table 1 and ii) determining prognosis of ovarian carcinoma. Preferably the target region comprises, or hybridizes under stringent conditions to a sequence of at least 16 contiguous nucleotides of a sequence selected from the group consisting of the genomic sequences as provided in Table 1.

[0074] More specifically, the present invention provides a method for determining prognosis of ovarian carcinoma in a subject suitable for use in a diagnostic tool, comprising: obtaining a biological sample comprising genomic nucleic acid(s); contacting the nucleic acid(s), or a fragment thereof, with a reagent or a plurality of reagents sufficient for distinguishing between methylated and non methylated CpG dinucleotide sequences within a target sequence of the subject nucleic acid, wherein the target sequence comprises, or hybridizes under stringent conditions to, a sequence comprising at least 16 contiguous nucleotides of the genomic sequences as provided in Table 1 said contiguous nucleotides comprising at least one CpG dinucleotide sequence; and determining, based at least in part on said distinguishing, the methylation status of at least one target CpG dinucleotide sequence, or an average, or a value reflecting an average methylation status of a plurality of target CpG dinucleotide sequences. The methylation status of a plurality of CpG dinucleotides can for example be determined by numerically averaging hybridization measurements from several contiguous nucleotide sequences comprising at least one CpG dinucleotide sequence, by measuring hybridization of a single contiguous nucleotide sequence comprising more than one CpG dinucleotide sequence, or by requiring concurrent hybridization of several contiguous nucleotide sequences comprising at least one CpG dinucleotide sequence (e.g. MSP MethyLight or HeavyMethyl™ MethyLight assays). It is particularly preferred that the methylation status of a plurality of CpG positions is determined, preferably at least 2, 3, 4, 5, 6, 7, 8, 9, 10, 11, 12, 13, 14, 15 or up to 25 CpG positions.

[0075] Further embodiments provide a method for determining prognosis of ovarian carcinoma in a subject (e.g. response prediction to chemotherapy treatment) of ovarian carcinoma, comprising: obtaining a biological sample having subject genomic DNA; extracting the genomic DNA; contacting the genomic DNA, or a fragment thereof, comprising one or more sequences selected from the group consisting of the genomic sequences as provided in Table 1 or a sequence that hybridizes under stringent conditions thereto, with one or more methylation-sensitive restriction enzymes, wherein the genomic DNA of the genomic sequences as provided in Table 1 is either digested thereby to produce digestion fragments, or is not digested thereby; and determining, based on a presence or absence of, or on property of at least one such fragment, the methylation status of at least one CpG dinucleotide sequence of the genomic sequences as provided in Table 1, or more preferably an average, or a value reflecting an average methylation status of a plurality of CpG dinucleotide sequences thereof. Preferably said plurality is at least 2, 5, 10, 15 or 25 CpG positions. Preferably, said enzymatically treated genomic DNA is amplified prior to said determining.

[0076] Insofar as the invention refers to response prediction to chemotherapy treatment (i.e. prognosis to chemotherapy treatment), chemotherapy agents are preferably platinum-compounds, such as carboplatin or cisplatin. As described above, such drugs are often given in combination, e.g. together with paclitaxel, gemcitabine, and others like bevazicumab or erlotinib.

[0077] Additional embodiments provide novel genomic and chemically modified nucleic acid sequences, as well as oligonucleotides and/or PNA-oligomers for analysis of cytosine methylation patterns within the genomic sequences as provided in Table 1, in particular for a medical use, in particular for determining prognosis of ovarian carcinoma in a subject.

[0078] The present invention provides a method for determining prognosis of ovarian carcinoma in a subject comprising determining the methylation levels of at least one gene selected from the group consisting of the genes as referred to by name in Table 1 in a biological sample isolated from said subject. Said markers may be used for determining prognosis of subjects having ovarian cancer.

[0079] The present invention provides for the use of the bisulfite technique, in combination with one or more methylation assays, for determination of the methylation status of CpG dinucleotide sequences within the genomic sequences as provided in Table 1. Genomic CpG dinucleotides can be methylated or unmethylated (alternatively known as up- and down-methylated respectively). However the methods of the present invention are suitable for the analysis of biological samples of a heterogeneous nature e.g. a low concentration of tumor cells within a background of stroma tissue or blood. Accordingly, when analyzing the methylation status of a CpG position within such a sample the person skilled in the art may use a quantitative assay for determining the level (e.g. percent, fraction, ratio, proportion or degree) of methylation at a particular CpG position as opposed to a methylation state. Accordingly the term methylation status or methylation state should also be taken to mean a value reflecting the degree of methylation at a CpG position. Unless specifically stated the terms “hypermethylated” or “upmethylated” shall be taken to mean a methylation level above that of a specified cut-off point, wherein said cut-off may be a value representing the average or median methylation level for a given population, or is preferably an optimized cut-off level. The “cut-off” is also referred herein as a “threshold”. In the context of the present invention the terms “methylated”, “hypermethylated” or “upmethylated” shall be taken to include a methylation level of one hundred (100) % (or equivalents thereof) or at or above a selected cut-off methylation value for all CpG positions within and associated with (e.g. in promoter or regulatory regions) at least one gene selected from the group consisting of the genes as referred to by name in Table 1. Unless specifically stated the terms “hypomethylated” or “down-methylated” shall be taken to mean a methylation level below that of a specified cut-off point, wherein said cut-off may be a value representing the average or median methylation level for a given population, or is preferably an optimized cut-off level. The “cut-off” is also referred herein as a “threshold”. In the context of the present invention the terms “unmethylated”, “hypomethylated” or “downmethylated” shall be taken to include a methylation level of zero (0) % (or equivalents thereof) or at or below a selected cut-off methylation value for all CpG positions within and associated with (e.g. in promoter or regulatory regions) at least one gene selected from the group consisting of the genes as referred to by name in Table 1.

[0080] According to the present invention, determination of the methylation status of CpG dinucleotide sequences within the genomic sequences as provided in Table 1 have utility in determining the prognosis of ovarian carcinoma patients.

[0081] Determining prognosis of ovarian carcinoma in a subject has further utility in the treatment optimization of ovarian cancer patients. More specifically, the most important prognostic factor for ovarian carcinomas after surgery is the response rate to platinum. Therefore it is likely that the markers subject to this invention predict the response to platinum-based chemotherapy.

[0082] In one embodiment the invention of said method comprises the following steps: i) contacting genomic DNA (preferably isolated from ovarian tumor tissue; lymph node metastasis tissue; blood; serum; plasma; peritoneal cavity fluid) obtained from the subject with at least one reagent, or series of reagents that distinguishes between methylated and non-methylated CpG dinucleotides within at least one gene selected from the group consisting of the genes as referred to by name in Table 1 (including promoter and regulatory regions thereof) and ii) determining the prognosis of the subject with ovarian carcinoma.

[0083] It is preferred that said one or more CpG dinucleotides of at least one gene selected from the group consisting of the genes as referred to by name in Table 1 are comprised of a respective genomic target sequence thereof as provided in the genomic sequences in Table 1 and complements thereof.

[0084] In a preferred embodiment, said method comprises the following steps: In the first step, a sample of the tissue to be analyzed is obtained.

[0085] The genomic DNA is then isolated from the sample. Genomic DNA may be isolated by any means standard in the art, including the use of commercially available kits. Briefly, wherein the DNA of interest is encapsulated in by a cellular membrane the biological sample must be disrupted and lysed by enzymatic, chemical or mechanical means. The DNA solution may then be cleared of proteins and other contaminants and the genomic DNA is then recovered from the solution. The person skilled in the art may also make use of devices such as filter devices e.g. ultrafiltration, silica surfaces or membranes, magnetic particles, polystyrol particles, polystyrol surfaces, positively charged surfaces, and positively charged membranes, charged membranes, charged surfaces, charged switch membranes, charged switched surfaces.

[0086] Once the nucleic acids have been extracted, the genomic double stranded DNA is analyzed.

[0087] In the second step of the method, the genomic DNA sample is treated that methylated cytosines are differentiated form non-methylated cytosines. A number of suitable treatment methods are known in the art, including but not limited to methylation sensitive restriction enzyme digest and treatment of the sample with bisulfite reagents. Both of said methods may be utilized in the method of the present invention, however the bisulfite treatment method is particularly preferred.

### Bisulfite Analysis Method

[0088] Methods of bisulfite treatment are known in the art. The bisulfite treated DNA is preferably purified prior to the subsequent method steps. This may be conducted by any means known in the art, such as but not limited to ultrafiltration. The purification is carried out according to the manufacturer's protocol. Suitable kits are commercially available, such as but not limited to the EpiTect Bisulfite Kit™ and EZ DNA Methylation Kit™.

[0089] In the third step of the method, fragments of the treated DNA are amplified, using one or more pairs of primer oligonucleotides according to the present invention, and an amplification enzyme. Preferably, the amplification is carried out by means of a polymerase chain reaction (PCR), in one embodiment said amplicons are 80 to 1,000 base pairs in length. Preferably each of said pair of primer oligonucleotides includes at least two oligonucleotides whose sequences are each reverse complementary, identical, or hybridize under stringent or highly stringent conditions to an at least 16-base-pair long segment of the base sequences of a sequence selected from the group consisting of the bisulfite sequences as provided in Table 1 and sequences complementary thereto.

[0090] Alternatively, the methylation status of pre-selected CpG positions within at least one gene selected from the group consisting of the genes as referred to by name in Table 1 and preferably within a target nucleic acid sequences thereof according to the genomic sequences in Table 1 may be detected by use of methylation-specific primer oligonucleotides. Said technique has been described in U.S. Pat. No. 6,265,171 (hereby incorporated by reference in its entirety). MSP primer pairs comprise at least one primer which hybridizes to a bisulfite treated CpG dinucleotide. Therefore, the sequence of said primers comprises at least one CpG dinucleotide. MSP primers specific for methylated DNA contain a “C” or “G” at the position of the C position in the CpG. MSP primers specific for non-methylated DNA contain a “T” or “A” at the position of the C position in the CpG. Preferably, therefore, the base sequence of said primers is required to comprise a sequence having a length of at least 9 nucleotides which hybridizes to a treated nucleic acid sequence according to one of the bisulfite sequences as provided in Table 1 and sequences complementary thereto, wherein the base sequence of said oligomers comprises at least one CpG dinucleotide.

[0091] A further preferred embodiment of the method comprises the use of blocker oligonucleotides (the HeavyMethyl™ assay). The use of such blocker oligonucleotides has been described by Yu et al., BioTechniques 23:714-720, 1997. Blocking probe oligonucleotides are hybridised to the bisulfite treated nucleic acid in tandem with the PCR primers. PCR amplification of the nucleic acid is terminated at the 5′ position of the blocking probe, such that amplification of a nucleic acid is suppressed where the complementary sequence to the blocking probe is present. Disruption of polymerase-mediated amplification requires that blocker oligonucleotides are not elongated by the polymerase. This is achieved through the use of blockers that are 3′-deoxyoligonucleotides, or oligonucleotides derivitized at the 3′ position with other than a “free” hydroxyl group. For example, 3′-O-acetyl oligonucleotides are representative of a preferred class of blocker molecule.

[0092] Said probes are preferably designed to hybridize to the bisulfite treated nucleic acid in a methylation status specific manner. For example, for detection of methylated nucleic acids within a population of unmethylated nucleic acids, suppression of the amplification of nucleic acids which are unmethylated at the position in question would be carried out by the use of blocking probes comprising a ‘CpA’ or ‘TpG’ at the position in question, as opposed to a ‘CpG’ if the suppression of amplification of methylated nucleic acids is desired.

[0093] It is further preferred that polymerase-mediated decomposition of the blocker oligonucleotides should be minimized. This may be achieved by use of a polymerase lacking 5′-3′ exonuclease activity, or use of modified blocker oligonucleotides having, for example, thioate bridges at the 5′-terminii thereof that render the blocker molecule nuclease-resistant.

[0094] Preferably, the base sequence of said blocking oligonucleotides is required to comprise a sequence having a length of at least 9 nucleotides which hybridizes to a treated nucleic acid sequence according to one of the bisulfite sequences as provided in Table 1 and sequences complementary thereto, wherein the base sequence of said oligonucleotides comprises at least one CpG, TpG or CpA dinucleotide. More preferably the base sequence of said blocking oligonucleotides is required to comprise a sequence having a length of at least 9 nucleotides which hybridizes to a treated nucleic acid sequence selected from the group consisting of the 0% methylated bisulfite sequences as provided in Table 1 and sequences complementary thereto.

[0095] The nucleic acid amplicons may be detectably labeled. Any suitable labels known in the art may be utilized, including but not limited to fluorescence labels, radionuclides, or detachable molecule fragments having a typical mass, which renders the detectable in a mass spectrometer.

[0096] In the fourth step of the method, the amplicons obtained during the third step of the method are analyzed in order to ascertain the methylation status of said at least one or more CpG dinucleotides prior to the treatment.

[0097] In embodiments where the amplicons were obtained by means of MSP amplification, the presence or absence of an amplicon is in itself indicative of the methylation state of the CpG positions covered by the primer, according to the base sequences of said primer. The presence or absence of said amplicon may be detected by means of any suitable means known in the art, including the detection of suitable labels, or by means of a nucleic acid detection probe.

[0098] Amplicons obtained by means of both standard and methylation specific PCR may be further analyzed by means of methods such as, but not limited to, array technology and probe based technologies as well as by means of techniques such as sequencing and template directed extension.

[0099] In one embodiment of the method, the amplicons synthesized in step three are subsequently hybridized to an array or a set of oligonucleotides and/or PNA probes. In this context, the hybridization takes place in the following manner: the set of probes used during the hybridization is preferably composed of at least 2 oligonucleotides or PNA-oligomers; in the process, the amplicons serve as probes which hybridize to oligonucleotides previously bonded to a solid phase; the non-hybridized fragments are subsequently removed; said oligonucleotides contain at least one base sequence having a length of at least 9 nucleotides which is reverse complementary or identical to a segment of the base sequences specified in the present Sequence Listing; and the segment comprises at least one CpG, TpG or CpA dinucleotide. The hybridizing portion of the hybridizing nucleic acids is typically at least 9, 15, 20, 25, 30 or 35 nucleotides in length. However, longer molecules have inventive utility, and are thus within the scope of the present invention.

[0100] In a preferred embodiment, said dinucleotide is present in the central third of the oligomer. For example, wherein the oligomer comprises one CpG dinucleotide, said dinucleotide is preferably the fifth to ninth nucleotide from the 5′-end of a 13-mer. One oligonucleotide exists for the analysis of each CpG dinucleotide within a sequence selected from the group consisting of the genomic sequences as provided in Table 1, and the equivalent positions within the bisulfite sequences as provided in Table 1. Said oligonucleotides may also be peptide nucleic acids. The non-hybridized amplicons are then removed, and the hybridized amplicons are detected. It is preferred that labels attached to the amplicons are identifiable at each position of the solid phase at which an oligonucleotide sequence is located.

[0101] In yet a further embodiment of the method, the genomic methylation status of the CpG positions may be ascertained by means of oligonucleotide probes (as detailed above) that are hybridized to the bisulfite treated DNA in tandem with the PCR amplification primers (wherein said primers may either be methylation specific or standard).

[0102] A particularly preferred embodiment of this method is the use of fluorescence-based Real Time Quantitative PCR (Heid et al., Genome Res. 6:986-994, 1996; also see U.S. Pat. No. 6,331,393) employing a dual-labeled fluorescent oligonucleotide probe (TaqMan™ PCR, using an ABI Prism 7700 Sequence Detection System, Perkin Elmer Applied Biosystems, Foster City, Calif.). The TaqMan™ PCR reaction employs the use of a non-extendible interrogating oligonucleotide, called a TaqMan™ probe, which, in preferred embodiments, is designed to hybridize to a CpG-rich sequence located between the forward and reverse amplification primers. The TaqMan™ probe further comprises a fluorescent “reporter moiety” and a “quencher moiety” covalently bound to linker moieties (e.g., phosphoramidites) attached to the nucleotides of the TaqMan™ oligonucleotide. For analysis of methylation within nucleic acids subsequent to bisulfite treatment, it is required that the probe be methylation specific, as described in U.S. Pat. No. 6,331,393, (hereby incorporated by reference in its entirety) also known as the MethyLightTM™ assay. Variations on the TaqMan™ detection methodology that are also suitable for use with the described invention include the use of dual-probe technology (Lightcycler™) or fluorescent amplification primers (Sunrise™ technology). Both these techniques may be adapted in a manner suitable for use with bisulfite treated DNA, and moreover for methylation analysis within CpG dinucleotides.

[0103] In a further preferred embodiment of the method, the fourth step of the method comprises the use of template-directed oligonucleotide extension, such as MS-SNuPE as described by Gonzalgo & Jones, Nucleic Acids Res. 25:2529-2531, 1997.

[0104] In yet a further embodiment of the method, the fourth step of the method comprises sequencing and subsequent sequence analysis of the amplicon generated in the third step of the method (Sanger F., et al., Proc Natl Acad Sci USA 74:5463-5467, 1977).

[0105] In the most preferred embodiment of the method the genomic nucleic acids are isolated and treated according to the first three steps of the method outlined above, namely:
[0106] a) Obtaining a tumor tissue or blood sample from a patient with ovarian cancer;
[0107] b) Extracting or otherwise isolating said genomic DNA from the tumor tissue or blood sample;
[0108] c) Treating the tumor DNA of b), or a fragment thereof, with one or more reagents e.g. bisulfite to convert cytosine bases that are unmethylated in the 5-position thereof to uracil or to another base that is detectably dissimilar to cytosine in terms of hybridization properties; and
[0109] d) Amplifying selected fragments of said treated DNA by means of methylation specific primers and/or blocking oligonucleotides, and
[0110] e) Determining presence or absence of said amplicons by means of a real-time detection probe, as described above.

[0111] Preferably, where the subsequent amplification of d) is carried out by means of methylation specific primers, as described above, said methylation specific primers comprise a sequence having a length of at least 9 nucleotides which hybridizes to a treated nucleic acid sequence according to one of the bisulfite sequences as provided in Table 1 and sequences complementary thereto, wherein the base sequence of said oligomers comprise at least one CpG dinucleotide.

[0112] Step e) of the method, namely the detection of the specific amplicons indicative of the methylation status of one or more CpG positions according to the genomic sequences as provided in Table 1 is carried out by means of real-time detection methods as described above.

### Restriction Enzyme Analysis

[0113] Additional embodiments of the invention provide a method for the analysis of the methylation status of the at least one gene selected from the group consisting of the genes as referred to by name in Table 1 (preferably the genomic sequences as provided in Table 1, and complements thereof) without the need for bisulfite conversion. Methods are known in the art wherein a methylation sensitive restriction enzyme reagent, or a series of restriction enzyme reagents comprising methylation sensitive restriction enzyme reagents that distinguishes between methylated and non-methylated CpG dinucleotides within a target region are utilized in determining methylation.

[0114] In the third step, the DNA (or fragments thereof) is digested with one or more methylation sensitive restriction enzymes. The digestion is carried out such that hydrolysis of the DNA at the restriction site is informative of the methylation status of a specific CpG dinucleotide of at least one gene selected from the group consisting of the genes as referred to by name in Table 1, it is particularly preferred that a target region of said gene(s) selected from Table 1 is analyzed.

[0115] Preferably, the methylation-specific restriction enzyme is selected from the group consisting of Bsi E1, Hga I HinPl, Hpy99I, Ava I, Bce AI, Bsa HI, Bisl, BstUI, BshI236I, AccII, BstFNI, McrBC, GlaI, MvnI, HpaII (HapII), HhaI, AciI, SmaI, HinP1I, HpyCH4IV, EagI and mixtures of two or more of the above enzymes. Preferred is a mixture containing the restriction enzymes BstUI, HpaII, HpyCH41V and HinP1I.

[0116] In the fourth step, which is optional but a preferred embodiment, the restriction fragments are amplified. This is preferably carried out using a polymerase chain reaction, and said amplicons may carry suitable detectable labels as discussed above, namely fluorophore labels, radionuclides and mass labels. Particularly preferred is amplification by means of an amplification enzyme and one or more primer pairs, each member of said pair comprising, in each case a contiguous sequence at least 16 nucleotides in length that is complementary to, or hybridizes under moderately stringent or stringent conditions to a sequence selected from the group consisting of the genomic sequences as provided in Table 1, and complements thereof. Preferably said contiguous sequence is at least 16, 20 or 25 nucleotides in length. In an alternative embodiment said primers may be complementary to any adaptors linked to the fragments.

[0117] In the fifth step the amplificons are detected. The detection may be by any means standard in the art, for example, but not limited to, gel electrophoresis analysis, hybridization analysis, incorporation of detectable tags within the PCR products, DNA array analysis, MALDI or ESI analysis. Preferably said detection is carried out by hybridization to at least one nucleic acid or peptide nucleic acid comprising in each case a contiguous sequence at least 16 nucleotides in length that is complementary to, or hybridizes under moderately stringent or stringent conditions to a sequence selected from the group consisting of the genomic sequences as provided in Table 1, and complements thereof. Preferably said contiguous sequence is at least 16, 20 or 25 nucleotides in length.

[0118] Subsequent to the determination of the methylation state or level of the genomic nucleic acids the prognosis of said subject having ovarian carcinoma is deduced based upon the methylation state or level of at least one CpG dinucleotide sequence of the genomic sequences as provided in Table 1, or a weighted average, a wighed geometric average, or a ranked average, or a arithmetic combination of logistic functions of methylation states or levels or a value mathematically reflecting a combined methylation state of a plurality of CpG dinucleotide sequences of the genomic sequences as provided in Table 1, wherein methylation is associated with patient prognosis.

[0119] Wherein said methylation is determined by quantitative means and for markers whose hypermethylation is associated with poor prognosis the cut-off point for determining said prognosis is preferably close to 0% (i.e. wherein a sample displays any degree of methylation it is determined as having a poor prognosis). For markers whose hypomethylation is associated with poor prognosis the cut-off point for determining said prognosis is preferably close to 100% (i.e. wherein a sample displays any degree of unmethylated DNA it is determined as having a poor prognosis).

[0120] Another preferred way of identifying the cut-off values is based on the distribution of measurements collected on all 90 tumor samples (see section “Cancer Samples” above), or any set of tumor or blood samples that stems from a representative collective of ovarian cancer patients. A certain quantile of this distribution is chosen as the cut-off point, preferably 50% (the median) but also values ranging from 25% through 75% or from 10% to 90%. For example, the 55% quantile would be that value for which 55% of all measurements are below that value and 45% are above that value. For genes whose hypomethylation is indicative of poor patient prognosis, a measurement that is below the cut-off would indicate a poor prognosis. For genes whose hypermethylation is indicative of poor patient prognosis, a measurement above the cut-off would indicate a poor prognosis.

[0121] Nonetheless, it is foreseen that the person skilled in the art may wish to adjust said cut-off value in order to provide an assay of a particularly preferred sensitivity or specificity. Accordingly said cut-off value may be increased (thus increasing the specificity) for genes whose hypermethylation is indicative of poor patient prognosis. Said cut off value may be within a range selected form the group consisting of 0%-5%, 5%-10%, 10%-15%, 15%-20%, 20%-30% and 30%-50%. Particularly preferred are the cut-offs 0.01%, 0.1%, 1% and 10%. Said cut-off value may be decreased (thus increasing the specificity) for genes whose hypomethylation is indicative of poor patient prognosis. Said cut off value may be within a range selected form the group consisting of 100%-95%, 95%-90%, 90%-85%, 85%-80%, 80%-70% and 70%-50%. Particularly preferred are the cut-offs 99.99%, 99.90%, 99% and 90%.

[0122] Another preferred determination to determine the cut-off value is based on the distribution of measurements taken from a sampling of ovarian cancer tissues that is representative of the target population. Preferably, this sampling is the set of cancer samples described in the section “Patient Samples” above. A certain quantile is chosen as the cut-off point, preferably 50% but also values ranging from 25% through 75%. For genes whose hypomethylation is indicative of poor patient prognosis, a measurement below the threshold would indicate a poor prognosis. For genes whose hypermethylation is indicative of poor patient prognosis, a measurement above the threshold would indicate a poor prognosis. The distribution of measurements with respect to which the threshold is determined as a quantile can be a group of patients.

[0123] Upon determination of the methylation of at least one gene selected from the group consisting of the genes as referred to by name in Table 1 the prognosis of said ovarian carcinoma patient is determined.

[0124] For the following genes, methylation and/or hypermethylation is associated with poor prognosis:

CLK3, MTMR4, NFE2L1, PERLD1, AKAP2, ANAPC1, ANKRD47, ATF7, ATP5G1, BCL2 (genomic target regions SEQ ID NO: 66, 71), C9orf3, COIL, CSF2, E2F3, ELMO2, ERBB2, GABRG2, GPC5, KIAA0100, KISS1, MARCH3, MRO, MSX1, NCOA6, PDGFRA, RPL23A (genomic target regions SEQ ID NO: 471, 476), RUFY3, TP53, TSPYL1, UBXD3, ZNF420

[0125] In a further embodiment, an increased methylation level of these genes is correlated to poor prognosis. In said embodiment the level of methylation is inversely proportional to patient survival time.

[0126] For the following genes, absence of methylation and/or hypomethylation is associated with poor prognosis:

BCL2 (genomic target regions SEQ ID NO: 76, 81), DMP1, HSPA6, PAPOLA, RPL23A (genomic target regions SEQ ID NO: 481, 486), SOX3.

[0127] In a further embodiment, a decreased level of methylation is correlated to poor prognosis. In said embodiment the level of methylation is proportional to patient survival time.

### Nucleic Acids

[0128] The disclosed invention provides treated nucleic acids the bisulfite sequences as provided in Table 1, derived from the genomic sequences as provided in Table 1. The sequences of the bisulfite sequences as provided in Table 1 are non-naturally occurring sequences and provide the sequences of various bisulfite modified nucleic acids of the genomic sequences as provided in Table 1.

[0129] In a preferred embodiment of the invention, the invention provides a non-naturally occurring modified nucleic acid comprising a sequence of at least 16 contiguous nucleotide bases in length of a sequence selected from the group consisting of the bisulfite sequences as provided in Table 1. In further preferred embodiments of the invention said nucleic acid is at least 50, 100, 150, 200, 250 or 500 base pairs in length of a segment of the nucleic acid sequence disclosed in the bisulfite sequences as provided in Table 1. Particularly preferred is a nucleic acid molecule that is identical or complementary to all or a portion of the bisulfite sequences as provided in Table 1 but not the genomic sequences as provided in Table 1 or other naturally occurring DNA.

[0130] It is preferred that said sequence comprises at least one CpG, TpG or CpA dinucleotide and sequences complementary thereto. The sequences of the bisulfite sequences of Table 1 provide non-naturally occurring modified versions of the nucleic acid according to the genomic sequences of Table 1, wherein the modification of each genomic sequence results in the synthesis of a nucleic acid having a sequence that is unique and distinct from said genomic sequence as follows. For each sense strand of genomic DNA, e.g., the genomic sequences as provided in Table 1, four converted versions are disclosed. A first version wherein “C” is converted to “T,” but “CpG” remains “CpG” (i.e., corresponds to case where, for the genomic sequence, 100% “C” residues of CpG dinucleotide sequences are methylated and are thus not converted); a second version of each genomic sequences is provided, wherein “C” is converted to “T” for all “C” residues, including those of “CpG” dinucleotide sequences (i.e., corresponds to case where, for the genomic sequences, 100% of “C” residues of CpG dinucleotide sequences are unmethylated). A third chemically converted version discloses the complement of the disclosed genomic DNA sequence (i.e. antisense strand), wherein “C” is converted to “T,” but “CpG” remains “CpG” (i.e., corresponds to case where 100% of “C” residues of CpG dinucleotide sequences are methylated and are thus not converted); a final bisulfite converted version of each sequence, discloses the complement of the disclosed genomic DNA sequence (i.e. antisense strand), wherein “C” is converted to “T” for 100% of “C” residues, including those of “CpG” dinucleotide sequences (i.e., corresponds to case where, for the complement (antisense strand) of each genomic sequence, all “C” residues of CpG dinucleotide sequences are unmethylated).

[0131] Alternatively, the invention further provides oligonucleotides or oligomers suitable for use in the methods of the invention for detecting the cytosine methylation state within genomic or treated (bisulfite modified) DNA, according to SEQ ID Nos: 1 to 550. Accordingly, said oligonucleotide or oligomer nucleic acids provide novel diagnostic means. Said oligonucleotide or oligomer comprise a nucleic acid sequence having a length of at least nine (9) nucleotides which is identical to, hybridizes, under moderately stringent or stringent conditions (as defined herein above), to a treated nucleic acid sequence according to the bisulfite sequences as provided in Table 1 and/or sequences complementary thereto, or to a genomic sequence according to the genomic sequences as provided in Table 1 and/or sequences complementary thereto.

[0132] Particularly preferred is a nucleic acid molecule that hybridizes under moderately stringent and/or stringent hybridization conditions to all or a portion of the sequences the bisulfite sequences as provided in Table 1, but not the genomic sequences as provided in Table 1 or other human genomic DNA.

[0133] The identical or hybridizing portion of the hybridizing nucleic acids is typically at least 9, 16, 20, 25, 30 or 35 nucleotides in length. However, longer molecules have inventive utility, and are thus within the scope of the present invention.

[0134] Preferably, the hybridizing portion of the inventive hybridizing nucleic acids is at least 95%, or at least 98%, or 100% identical to the sequence, or to a portion thereof of SEQ ID NOs: 1 to 550, or to the complements thereof.

[0135] In further embodiments, the present invention provides a set of at least two (2) oligonucleotides that are used as ‘primer’ oligonucleotides for amplifying DNA sequences of one of SEQ ID NOs: 1 to 550 and sequences complementary thereto, or segments thereof.

[0136] It is particularly preferred that the oligomers according to the invention are utilized for determining the prognosis of ovarian carcinoma patients.

[0137] Genomic SEQ ID NO: 1 provides the preferred target genomic nucleic acid of the gene CLK3. Furthermore, SEQ ID NO: 6, 11 each provide a particularly preferred target region thereof.

[0138] Genomic SEQ ID NO: 16 provides the preferred target genomic nucleic acid of the gene MTMR4. Furthermore, SEQ ID NO: 21, 26, 31, 36 each provide a particularly preferred target region thereof.

[0139] Genomic SEQ ID NO: 41 provides the preferred target genomic nucleic acid of the gene NFE2L1. Furthermore, SEQ ID NO: 46, 51, 56, 61 each provide a particularly preferred target region thereof.

[0140] Genomic SEQ ID NO: 66 provides the preferred target genomic nucleic acid of the gene PERLD1. Furthermore, SEQ ID NO: 71, 76, 81, 86, 91, 96, 101, 106, 111 each provide a particularly preferred target region thereof.

[0141] Genomic SEQ ID NO: 116 provides the preferred target genomic nucleic acid of the gene AKAP2. Furthermore, SEQ ID NO: 121, 126, 131 each provide a particularly preferred target region thereof.

[0142] Genomic SEQ ID NO: 136 provides the preferred target genomic nucleic acid of the gene ANAPC1. Furthermore, SEQ ID NO: 141 provides a particularly preferred target region thereof.

[0143] Genomic SEQ ID NO: 146 provides the preferred target genomic nucleic acid of the gene ANKRD47. Furthermore, SEQ ID NO: 151, 156 each provide a particularly preferred target region thereof.

[0144] Genomic SEQ ID NO: 161 provides the preferred target genomic nucleic acid of the gene ATF7. Furthermore, SEQ ID NO: 166 provides a particularly preferred target region thereof.

[0145] Genomic SEQ ID NO: 171 provides the preferred target genomic nucleic acid of the gene ATP5G1. Furthermore, SEQ ID NO: 176 provides a particularly preferred target region thereof.

[0146] Genomic SEQ ID NO: 181 provides the preferred target genomic nucleic acid of the gene BCL2. Furthermore, SEQ ID NO: 186, 191, 196 each provide a particularly preferred target region thereof.

[0147] Genomic SEQ ID NO: 201 provides the preferred target genomic nucleic acid of the gene C9orf3. Furthermore, SEQ ID NO: 206 provides a particularly preferred target region thereof.

[0148] Genomic SEQ ID NO: 211 provides the preferred target genomic nucleic acid of the gene COIL. Furthermore, SEQ ID NO: 216 provides a particularly preferred target region thereof.

[0149] Genomic SEQ ID NO: 221 provides the preferred target genomic nucleic acid of the gene CSF2. Furthermore, SEQ ID NO: 226 provides a particularly preferred target region thereof.

[0150] Genomic SEQ ID NO: 231 provides the preferred target genomic nucleic acid of the gene DMP 1. Furthermore, SEQ ID NO: 236 provides a particularly preferred target region thereof.

[0151] Genomic SEQ ID NO: 241 provides the preferred target genomic nucleic acid of the gene E2F3. Furthermore, SEQ ID NO: 246, 251 each provide a particularly preferred target region thereof.

[0152] Genomic SEQ ID NO: 256 provides the preferred target genomic nucleic acid of the gene ELMO2. Furthermore, SEQ ID NO: 261 provides a particularly preferred target region thereof.

[0153] Genomic SEQ ID NO: 266 provides the preferred target genomic nucleic acid of the gene ERBB2. Furthermore, SEQ ID NO: 271, 276, 281, 286 each provide a particularly preferred target region thereof.

[0154] Genomic SEQ ID NO: 291 provides the preferred target genomic nucleic acid of the gene GABRG2. Furthermore, SEQ ID NO: 296 provides a particularly preferred target region thereof.

[0155] Genomic SEQ ID NO: 301 provides the preferred target genomic nucleic acid of the gene GPC5. Furthermore, SEQ ID NO: 306, 311, 316 each provide a particularly preferred target region thereof.

[0156] Genomic SEQ ID NO: 321 provides the preferred target genomic nucleic acid of the gene HSPA6. Furthermore, SEQ ID NO: 326 provides a particularly preferred target region thereof.

[0157] Genomic SEQ ID NO: 331 provides the preferred target genomic nucleic acid of the gene KIAA0100. Furthermore, SEQ ID NO: 336 provides a particularly preferred target region thereof.

[0158] Genomic SEQ ID NO: 341 provides the preferred target genomic nucleic acid of the gene KISS1. Furthermore, SEQ ID NO: 346, 351 each provide a particularly preferred target region thereof.

[0159] Genomic SEQ ID NO: 356 provides the preferred target genomic nucleic acid of the gene MARCH3. Furthermore, SEQ ID NO: 361 provides a particularly preferred target region thereof.

[0160] Genomic SEQ ID NO: 366 provides the preferred target genomic nucleic acid of the gene MRO. Furthermore, SEQ ID NO: 371 provides a particularly preferred target region thereof.

[0161] Genomic SEQ ID NO: 376 provides the preferred target genomic nucleic acid of the gene MSX1. Furthermore, SEQ ID NO: 381, 386, 391, 396, 401, 406, 411, 416, 421, 426, 431 each provide a particularly preferred target region thereof.

[0162] Genomic SEQ ID NO: 436 provides the preferred target genomic nucleic acid of the gene NCOA6. Furthermore, SEQ ID NO: 441 provides a particularly preferred target region thereof.

[0163] Genomic SEQ ID NO: 446 provides the preferred target genomic nucleic acid of the gene PAPOLA. Furthermore, SEQ ID NO: 451 provides a particularly preferred target region thereof.

[0164] Genomic SEQ ID NO: 456 provides the preferred target genomic nucleic acid of the gene PDGFRA. Furthermore, SEQ ID NO: 461, 466 each provide a particularly preferred target region thereof.

[0165] Genomic SEQ ID NO: 471 provides the preferred target genomic nucleic acid of the gene RPL23A. Furthermore, SEQ ID NO: 476, 481, 486 each provide a particularly preferred target region thereof.

[0166] Genomic SEQ ID NO: 491 provides the preferred target genomic nucleic acid of the gene RUFY3. Furthermore, SEQ ID NO: 496 provides a particularly preferred target region thereof.

[0167] Genomic SEQ ID NO: 501 provides the preferred target genomic nucleic acid of the gene SOX3. Furthermore, SEQ ID NO: 506 provides a particularly preferred target region thereof.

[0168] Genomic SEQ ID NO: 511 provides the preferred target genomic nucleic acid of the gene TP53. Furthermore, SEQ ID NO: 516 provides a particularly preferred target region thereof.

[0169] Genomic SEQ ID NO: 521 provides the preferred target genomic nucleic acid of the gene TSPYL 1. Furthermore, SEQ ID NO: 526 provides a particularly preferred target region thereof.

[0170] Genomic SEQ ID NO: 531 provides the preferred target genomic nucleic acid of the gene UBXD3. Furthermore, SEQ ID NO: 536 provides a particularly preferred target region thereof.

[0171] Genomic SEQ ID NO: 541 provides the preferred target genomic nucleic acid of the gene ZNF420. Furthermore, SEQ ID NO: 546 provides a particularly preferred target region thereof.

### Kits

[0172] Moreover, an additional aspect of the present invention is a kit comprising: a means for determining methylation of at least one gene selected from the group consisting of the genes as referred to by name in Table 1. The means for determining methylation of at least one gene selected from the group consisting of the genes as referred to by name in Table 1 comprise preferably a bisulfite-containing reagent; one or a plurality of oligonucleotides consisting whose sequences in each case are identical, are complementary, or hybridize under stringent or highly stringent conditions to a 9 or more preferably 18 base long segment of a sequence selected from the bisulfite sequences as provided in Table 1; and optionally instructions for carrying out and evaluating the described method of methylation analysis. In one embodiment the base sequence of said oligonucleotides comprises at least one CpG, CpA or TpG dinucleotide.

[0173] In a further embodiment, said kit may further comprise standard reagents for performing a CpG position-specific methylation analysis, wherein said analysis comprises one or more of the following techniques: MS-SNuPE, MSP, MethyLight™, HeavyMethyl, COBRA, and nucleic acid sequencing. However, a kit of the present invention can also contain only part of the aforementioned components.

[0174] In a preferred embodiment the kit may comprise additional bisulfite conversion reagents selected from the group consisting: DNA denaturation buffer; sulfonation buffer; DNA recovery reagents or kits (e.g., precipitation, ultrafiltration, affinity column); desulfonation buffer; and DNA recovery components.

[0175] In a further alternative embodiment, the kit may contain further elements packaged in separate containers, such as but not limited to a polymerase and a reaction buffer optimized for primer extension mediated by the polymerase, such as PCR. In another embodiment of the invention the kit further comprises means for obtaining a biological sample of the patient. Preferred is a kit, which further comprises a container suitable for containing the means for determining methylation of at least one gene selected from the group consisting of the genes as referred to by name in Table 1 in the biological sample of the patient, and most preferably further comprises instructions for use and interpretation of the kit results. In a preferred embodiment the kit comprises: (a) a bisulfite reagent; (b) a container suitable for containing the said bisulfite reagent and the biological sample of the patient; (c) at least one set of primer oligonucleotides containing two oligonucleotides whose sequences in each case are identical, are complementary, or hybridize under stringent or highly stringent conditions to an at least 9 or more preferably 18 base long segment of a sequence selected from the bisulfite sequences as provided in Table 1; and optionally (d) instructions for use and interpretation of the kit results. In an alternative preferred embodiment the kit comprises: (a) a bisulfite reagent; (b) a container suitable for containing the said bisulfite reagent and the biological sample of the patient; (c) at least one oligonucleotides and/or PNA-oligomer having a length of at least 9 or 18 nucleotides which is identical to or hybridizes to a bisulfite treated nucleic acid sequence according to one of the bisulfite sequences as provided in Table 1 and sequences complementary thereto; and optionally (d) instructions for use and interpretation of the kit results.

[0176] In an alternative embodiment the kit comprises: (a) a bisulfite reagent; (b) a container suitable for containing the said bisulfite reagent and the biological sample of the patient; (c) at least one set of primer oligonucleotides containing two oligonucleotides whose sequences in each case are identical, are complementary, or hybridize under stringent or highly stringent conditions to an at least 9 or more preferably 18 base long segment of a sequence selected from the bisulfite sequences as provided in Table 1; (d) at least one oligonucleotides and/or PNA-oligomer having a length of at least 9 or 16 nucleotides which is identical to or hybridizes to a pre-treated nucleic acid sequence according to one of the bisulfite sequences as provided in Table 1 and sequences complementary thereto; and optionally (e) instructions for use and interpretation of the kit results.

[0177] The kit may also contain other components such as buffers or solutions suitable for blocking, washing or coating, packaged in a separate container.

[0178] Moreover, an additional aspect of the present invention is an alternative kit comprising a means for determining the CpG methylation status of at least one gene selected from the group consisting of the genes as referred to by name in Table 1, wherein said means comprise preferably at least one methylation specific restriction enzyme; one or a plurality of primer oligonucleotides (preferably one or a plurality of primer pairs) suitable for the amplification of a sequence comprising at least one CpG dinucleotide of a sequence selected from the genomic sequences as provided in Table 1; and optionally instructions for carrying out and evaluating the described method of methylation analysis. In one embodiment the base sequence of said oligonucleotides are identical, are complementary, or hybridize under stringent or highly stringent conditions to an at least 18 base long segment of a sequence selected from the genomic sequences as provided in Table 1.

[0179] In a further embodiment said kit may comprise one or a plurality of oligonucleotide probes for the analysis of the digest fragments, preferably said oligonucleotides are identical, are complementary, or hybridize under stringent or highly stringent conditions to an at least 16 base long segment of a sequence selected from the genomic sequences as provided in Table 1, it is further preferred that the sequence thereof comprises at least one or more CpG dinucleotides.

[0180] In a preferred embodiment the kit may comprise additional reagents selected from the group consisting: buffer (e.g. restriction enzyme, PCR, storage or washing buffers); DNA recovery reagents or kits (e.g., precipitation, ultrafiltration, affinity column) and DNA recovery components.

[0181] In a further alternative embodiment, the kit may contain, packaged in separate containers, a polymerase and a reaction buffer optimized for primer extension mediated by the polymerase, such as PCR. In another embodiment of the invention the kit further comprising means for obtaining a biological sample of the patient. In a preferred embodiment the kit comprises: (a) a methylation sensitive restriction enzyme reagent; (b) a container suitable for containing the said reagent and the biological sample of the patient; (c) at least one set of oligonucleotides one or a plurality of nucleic acids or peptide nucleic acids which are identical, are complementary, or hybridise under stringent or highly stringent conditions to an at least 9 base long segment of a sequence selected from the genomic sequences as provided in Table 1; and optionally (d) instructions for use and interpretation of the kit results.

[0182] In an alternative preferred embodiment the kit comprises: (a) a methylation sensitive restriction enzyme reagent; (b) a container suitable for containing the said reagent and the biological sample of the patient; (c) at least one set of primer oligonucleotides suitable for the amplification of a sequence comprising at least one CpG dinucleotide of a sequence selected from the genomic sequences as provided in Table 1; and optionally (d) instructions for use and interpretation of the kit results.

[0183] In an alternative embodiment the kit comprises: (a) a methylation sensitive restriction enzyme reagent; (b) a container suitable for containing the said reagent and the biological sample of the patient; (c) at least one set of primer oligonucleotides suitable for the amplification of a sequence comprising at least one CpG dinucleotide of a sequence selected from the genomic sequences as provided in Table 1; (d) at least one set of oligonucleotides one or a plurality of nucleic acids or peptide nucleic acids which are identical, are complementary, or hybridise under stringent or highly stringent conditions to an at least 9 base long segment of a sequence selected from the genomic sequences as provided in Table 1 and optionally (e) instructions for use and interpretation of the kit results.

[0184] The kit may also contain other components such as buffers or solutions suitable for blocking, washing or coating, packaged in a separate container.

TABLE 1
Target sequences according to the invention are shown that can be used as a marker to determine the prognosis of
ovarian carcinoma in a subject. The genomic sequence of each target sequence can be used in the method of the invention
to determine the prognosis of ovarian carcinoma in a subject. The corresponding bisulfite sequences i.e. the sequences
obtainable from the respective target sequence after treatment with bisulfite (when the genomic target sequence
is either 100% or 0% methylated) can be used in determining the prognosis of ovarian carcinoma in a subject according
to the invention. In the left column, target sequences are referred to by gene name.

| | | Bisulfite Sequences | | | |
|---|---|---|---|---|---|
| | | 100% methylated | 0% methylated | 100% methylated | 0% methylated |
| | Genomic | bisulfite converted | bisulfite converted | bisulfite converted | bisulfite converted |
| GeneName | Sequence | sense strand | sense strand | antisense strand | antisense strand |
| CLK3 | SEQ ID NO 1 | SEQ ID NO 2 | SEQ ID NO 3 | SEQ ID NO 4 | SEQ ID NO 5 |
| CLK3 | SEQ ID NO 6 | SEQ ID NO 7 | SEQ ID NO 8 | SEQ ID NO 9 | SEQ ID NO 10 |
| CLK3 | SEQ ID NO 11 | SEQ ID NO 12 | SEQ ID NO 13 | SEQ ID NO 14 | SEQ ID NO 15 |
| MTMR4 | SEQ ID NO 16 | SEQ ID NO 17 | SEQ ID NO 18 | SEQ ID NO 19 | SEQ ID NO 20 |
| MTMR4 | SEQ ID NO 21 | SEQ ID NO 22 | SEQ ID NO 23 | SEQ ID NO 24 | SEQ ID NO 25 |
| MTMR4 | SEQ ID NO 26 | SEQ ID NO 27 | SEQ ID NO 28 | SEQ ID NO 29 | SEQ ID NO 30 |
| MTMR4 | SEQ ID NO 31 | SEQ ID NO 32 | SEQ ID NO 33 | SEQ ID NO 34 | SEQ ID NO 35 |
| MTMR4 | SEQ ID NO 36 | SEQ ID NO 37 | SEQ ID NO 38 | SEQ ID NO 39 | SEQ ID NO 40 |
| NFE2L1 | SEQ ID NO 41 | SEQ ID NO 42 | SEQ ID NO 43 | SEQ ID NO 44 | SEQ ID NO 45 |
| NFE2L1 | SEQ ID NO 46 | SEQ ID NO 47 | SEQ ID NO 48 | SEQ ID NO 49 | SEQ ID NO 50 |
| NFE2L1 | SEQ ID NO 51 | SEQ ID NO 52 | SEQ ID NO 53 | SEQ ID NO 54 | SEQ ID NO 55 |
| NFE2L1 | SEQ ID NO 56 | SEQ ID NO 57 | SEQ ID NO 58 | SEQ ID NO 59 | SEQ ID NO 60 |
| NFE2L1 | SEQ ID NO 61 | SEQ ID NO 62 | SEQ ID NO 63 | SEQ ID NO 64 | SEQ ID NO 65 |
| PERLD1 | SEQ ID NO 66 | SEQ ID NO 67 | SEQ ID NO 68 | SEQ ID NO 69 | SEQ ID NO 70 |
| PERLD1 | SEQ ID NO 71 | SEQ ID NO 72 | SEQ ID NO 73 | SEQ ID NO 74 | SEQ ID NO 75 |
| PERLD1 | SEQ ID NO 76 | SEQ ID NO 77 | SEQ ID NO 78 | SEQ ID NO 79 | SEQ ID NO 80 |
| PERLD1 | SEQ ID NO 81 | SEQ ID NO 82 | SEQ ID NO 83 | SEQ ID NO 84 | SEQ ID NO 85 |
| PERLD1 | SEQ ID NO 86 | SEQ ID NO 87 | SEQ ID NO 88 | SEQ ID NO 89 | SEQ ID NO 90 |
| PERLD1 | SEQ ID NO 91 | SEQ ID NO 92 | SEQ ID NO 93 | SEQ ID NO 94 | SEQ ID NO 95 |
| PERLD1 | SEQ ID NO 96 | SEQ ID NO 97 | SEQ ID NO 98 | SEQ ID NO 99 | SEQ ID NO 100 |
| PERLD1 | SEQ ID NO 101 | SEQ ID NO 102 | SEQ ID NO 103 | SEQ ID NO 104 | SEQ ID NO 105 |
| PERLD1 | SEQ ID NO 106 | SEQ ID NO 107 | SEQ ID NO 108 | SEQ ID NO 109 | SEQ ID NO 110 |
| PERLD1 | SEQ ID NO 111 | SEQ ID NO 112 | SEQ ID NO 113 | SEQ ID NO 114 | SEQ ID NO 115 |
| AKAP2 | SEQ ID NO 116 | SEQ ID NO 117 | SEQ ID NO 118 | SEQ ID NO 119 | SEQ ID NO 120 |
| AKAP2 | SEQ ID NO 121 | SEQ ID NO 122 | SEQ ID NO 123 | SEQ ID NO 124 | SEQ ID NO 125 |
| AKAP2 | SEQ ID NO 126 | SEQ ID NO 127 | SEQ ID NO 128 | SEQ ID NO 129 | SEQ ID NO 130 |
| AKAP2 | SEQ ID NO 131 | SEQ ID NO 132 | SEQ ID NO 133 | SEQ ID NO 134 | SEQ ID NO 135 |
| ANAPC1 | SEQ ID NO 136 | SEQ ID NO 137 | SEQ ID NO 138 | SEQ ID NO 139 | SEQ ID NO 140 |
| ANAPC1 | SEQ ID NO 141 | SEQ ID NO 142 | SEQ ID NO 143 | SEQ ID NO 144 | SEQ ID NO 145 |
| ANKRD47 | SEQ ID NO 146 | SEQ ID NO 147 | SEQ ID NO 148 | SEQ ID NO 149 | SEQ ID NO 150 |
| ANKRD47 | SEQ ID NO 151 | SEQ ID NO 152 | SEQ ID NO 153 | SEQ ID NO 154 | SEQ ID NO 155 |
| ANKRD47 | SEQ ID NO 156 | SEQ ID NO 157 | SEQ ID NO 158 | SEQ ID NO 159 | SEQ ID NO 160 |
| ATF7 | SEQ ID NO 161 | SEQ ID NO 162 | SEQ ID NO 163 | SEQ ID NO 164 | SEQ ID NO 165 |
| ATF7 | SEQ ID NO 166 | SEQ ID NO 167 | SEQ ID NO 168 | SEQ ID NO 169 | SEQ ID NO 170 |
| ATP5G1 | SEQ ID NO 171 | SEQ ID NO 172 | SEQ ID NO 173 | SEQ ID NO 174 | SEQ ID NO 175 |
| ATP5G1 | SEQ ID NO 176 | SEQ ID NO 177 | SEQ ID NO 178 | SEQ ID NO 179 | SEQ ID NO 180 |
| BCL2 | SEQ ID NO 181 | SEQ ID NO 182 | SEQ ID NO 183 | SEQ ID NO 184 | SEQ ID NO 185 |
| BCL2 | SEQ ID NO 186 | SEQ ID NO 187 | SEQ ID NO 188 | SEQ ID NO 189 | SEQ ID NO 190 |
| BCL2 | SEQ ID NO 191 | SEQ ID NO 192 | SEQ ID NO 193 | SEQ ID NO 194 | SEQ ID NO 195 |
| BCL2 | SEQ ID NO 196 | SEQ ID NO 197 | SEQ ID NO 198 | SEQ ID NO 199 | SEQ ID NO 200 |
| C9orf3 | SEQ ID NO 201 | SEQ ID NO 202 | SEQ ID NO 203 | SEQ ID NO 204 | SEQ ID NO 205 |
| C9orf3 | SEQ ID NO 206 | SEQ ID NO 207 | SEQ ID NO 208 | SEQ ID NO 209 | SEQ ID NO 210 |
| COIL | SEQ ID NO 211 | SEQ ID NO 212 | SEQ ID NO 213 | SEQ ID NO 214 | SEQ ID NO 215 |
| COIL | SEQ ID NO 216 | SEQ ID NO 217 | SEQ ID NO 218 | SEQ ID NO 219 | SEQ ID NO 220 |
| CSF2 | SEQ ID NO 221 | SEQ ID NO 222 | SEQ ID NO 223 | SEQ ID NO 224 | SEQ ID NO 225 |
| CSF2 | SEQ ID NO 226 | SEQ ID NO 227 | SEQ ID NO 228 | SEQ ID NO 229 | SEQ ID NO 230 |
| DMP1 | SEQ ID NO 231 | SEQ ID NO 232 | SEQ ID NO 233 | SEQ ID NO 234 | SEQ ID NO 235 |
| DMP1 | SEQ ID NO 236 | SEQ ID NO 237 | SEQ ID NO 238 | SEQ ID NO 239 | SEQ ID NO 240 |
| E2F3 | SEQ ID NO 241 | SEQ ID NO 242 | SEQ ID NO 243 | SEQ ID NO 244 | SEQ ID NO 245 |
| E2F3 | SEQ ID NO 246 | SEQ ID NO 247 | SEQ ID NO 248 | SEQ ID NO 249 | SEQ ID NO 250 |
| E2F3 | SEQ ID NO 251 | SEQ ID NO 252 | SEQ ID NO 253 | SEQ ID NO 254 | SEQ ID NO 255 |
| ELMO2 | SEQ ID NO 256 | SEQ ID NO 257 | SEQ ID NO 258 | SEQ ID NO 259 | SEQ ID NO 260 |
| ELMO2 | SEQ ID NO 261 | SEQ ID NO 262 | SEQ ID NO 263 | SEQ ID NO 264 | SEQ ID NO 265 |
| ERBB2 | SEQ ID NO 266 | SEQ ID NO 267 | SEQ ID NO 268 | SEQ ID NO 269 | SEQ ID NO 270 |
| ERBB2 | SEQ ID NO 271 | SEQ ID NO 272 | SEQ ID NO 273 | SEQ ID NO 274 | SEQ ID NO 275 |
| ERBB2 | SEQ ID NO 276 | SEQ ID NO 277 | SEQ ID NO 278 | SEQ ID NO 279 | SEQ ID NO 280 |
| ERBB2 | SEQ ID NO 281 | SEQ ID NO 282 | SEQ ID NO 283 | SEQ ID NO 284 | SEQ ID NO 285 |
| ERBB2 | SEQ ID NO 286 | SEQ ID NO 287 | SEQ ID NO 288 | SEQ ID NO 289 | SEQ ID NO 290 |
| GABRG2 | SEQ ID NO 291 | SEQ ID NO 292 | SEQ ID NO 293 | SEQ ID NO 294 | SEQ ID NO 295 |
| GABRG2 | SEQ ID NO 296 | SEQ ID NO 297 | SEQ ID NO 298 | SEQ ID NO 299 | SEQ ID NO 300 |
| GPC5 | SEQ ID NO 301 | SEQ ID NO 302 | SEQ ID NO 303 | SEQ ID NO 304 | SEQ ID NO 305 |
| GPC5 | SEQ ID NO 306 | SEQ ID NO 307 | SEQ ID NO 308 | SEQ ID NO 309 | SEQ ID NO 310 |
| GPC5 | SEQ ID NO 311 | SEQ ID NO 312 | SEQ ID NO 313 | SEQ ID NO 314 | SEQ ID NO 315 |
| GPC5 | SEQ ID NO 316 | SEQ ID NO 317 | SEQ ID NO 318 | SEQ ID NO 319 | SEQ ID NO 320 |
| HSPA6 | SEQ ID NO 321 | SEQ ID NO 322 | SEQ ID NO 323 | SEQ ID NO 324 | SEQ ID NO 325 |
| HSPA6 | SEQ ID NO 326 | SEQ ID NO 327 | SEQ ID NO 328 | SEQ ID NO 329 | SEQ ID NO 330 |
| KIAA0100 | SEQ ID NO 331 | SEQ ID NO 332 | SEQ ID NO 333 | SEQ ID NO 334 | SEQ ID NO 335 |
| KIAA0100 | SEQ ID NO 336 | SEQ ID NO 337 | SEQ ID NO 338 | SEQ ID NO 339 | SEQ ID NO 340 |
| KISS1 | SEQ ID NO 341 | SEQ ID NO 342 | SEQ ID NO 343 | SEQ ID NO 344 | SEQ ID NO 345 |
| KISS1 | SEQ ID NO 346 | SEQ ID NO 347 | SEQ ID NO 348 | SEQ ID NO 349 | SEQ ID NO 350 |
| KISS1 | SEQ ID NO 351 | SEQ ID NO 352 | SEQ ID NO 353 | SEQ ID NO 354 | SEQ ID NO 355 |
| MARCH3 | SEQ ID NO 356 | SEQ ID NO 357 | SEQ ID NO 358 | SEQ ID NO 359 | SEQ ID NO 360 |
| MARCH3 | SEQ ID NO 361 | SEQ ID NO 362 | SEQ ID NO 363 | SEQ ID NO 364 | SEQ ID NO 365 |
| MRO | SEQ ID NO 366 | SEQ ID NO 367 | SEQ ID NO 368 | SEQ ID NO 369 | SEQ ID NO 370 |
| MRO | SEQ ID NO 371 | SEQ ID NO 372 | SEQ ID NO 373 | SEQ ID NO 374 | SEQ ID NO 375 |
| MSX1 | SEQ ID NO 376 | SEQ ID NO 377 | SEQ ID NO 378 | SEQ ID NO 379 | SEQ ID NO 380 |
| MSX1 | SEQ ID NO 381 | SEQ ID NO 382 | SEQ ID NO 383 | SEQ ID NO 384 | SEQ ID NO 385 |
| MSX1 | SEQ ID NO 386 | SEQ ID NO 387 | SEQ ID NO 388 | SEQ ID NO 389 | SEQ ID NO 390 |
| MSX1 | SEQ ID NO 391 | SEQ ID NO 392 | SEQ ID NO 393 | SEQ ID NO 394 | SEQ ID NO 395 |
| MSX1 | SEQ ID NO 396 | SEQ ID NO 397 | SEQ ID NO 398 | SEQ ID NO 399 | SEQ ID NO 400 |
| MSX1 | SEQ ID NO 401 | SEQ ID NO 402 | SEQ ID NO 403 | SEQ ID NO 404 | SEQ ID NO 405 |
| MSX1 | SEQ ID NO 406 | SEQ ID NO 407 | SEQ ID NO 408 | SEQ ID NO 409 | SEQ ID NO 410 |
| MSX1 | SEQ ID NO 411 | SEQ ID NO 412 | SEQ ID NO 413 | SEQ ID NO 414 | SEQ ID NO 415 |
| MSX1 | SEQ ID NO 416 | SEQ ID NO 417 | SEQ ID NO 418 | SEQ ID NO 419 | SEQ ID NO 420 |
| MSX1 | SEQ ID NO 421 | SEQ ID NO 422 | SEQ ID NO 423 | SEQ ID NO 424 | SEQ ID NO 425 |
| MSX1 | SEQ ID NO 426 | SEQ ID NO 427 | SEQ ID NO 428 | SEQ ID NO 429 | SEQ ID NO 430 |
| MSX1 | SEQ ID NO 431 | SEQ ID NO 432 | SEQ ID NO 433 | SEQ ID NO 434 | SEQ ID NO 435 |
| NCOA6 | SEQ ID NO 436 | SEQ ID NO 437 | SEQ ID NO 438 | SEQ ID NO 439 | SEQ ID NO 440 |
| NCOA6 | SEQ ID NO 441 | SEQ ID NO 442 | SEQ ID NO 443 | SEQ ID NO 444 | SEQ ID NO 445 |
| PAPOLA | SEQ ID NO 446 | SEQ ID NO 447 | SEQ ID NO 448 | SEQ ID NO 449 | SEQ ID NO 450 |
| PAPOLA | SEQ ID NO 451 | SEQ ID NO 452 | SEQ ID NO 453 | SEQ ID NO 454 | SEQ ID NO 455 |
| PDGFRA | SEQ ID NO 456 | SEQ ID NO 457 | SEQ ID NO 458 | SEQ ID NO 459 | SEQ ID NO 460 |
| PDGFRA | SEQ ID NO 461 | SEQ ID NO 462 | SEQ ID NO 463 | SEQ ID NO 464 | SEQ ID NO 465 |
| PDGFRA | SEQ ID NO 466 | SEQ ID NO 467 | SEQ ID NO 468 | SEQ ID NO 469 | SEQ ID NO 470 |
| RPL23A | SEQ ID NO 471 | SEQ ID NO 472 | SEQ ID NO 473 | SEQ ID NO 474 | SEQ ID NO 475 |
| RPL23A | SEQ ID NO 476 | SEQ ID NO 477 | SEQ ID NO 478 | SEQ ID NO 479 | SEQ ID NO 480 |
| RPL23A | SEQ ID NO 481 | SEQ ID NO 482 | SEQ ID NO 483 | SEQ ID NO 484 | SEQ ID NO 485 |
| RPL23A | SEQ ID NO 486 | SEQ ID NO 487 | SEQ ID NO 488 | SEQ ID NO 489 | SEQ ID NO 490 |
| RUFY3 | SEQ ID NO 491 | SEQ ID NO 492 | SEQ ID NO 493 | SEQ ID NO 494 | SEQ ID NO 495 |
| RUFY3 | SEQ ID NO 496 | SEQ ID NO 497 | SEQ ID NO 498 | SEQ ID NO 499 | SEQ ID NO 500 |
| SOX3 | SEQ ID NO 501 | SEQ ID NO 502 | SEQ ID NO 503 | SEQ ID NO 504 | SEQ ID NO 505 |
| SOX3 | SEQ ID NO 506 | SEQ ID NO 507 | SEQ ID NO 508 | SEQ ID NO 509 | SEQ ID NO 510 |
| TP53 | SEQ ID NO 511 | SEQ ID NO 512 | SEQ ID NO 513 | SEQ ID NO 514 | SEQ ID NO 515 |
| TP53 | SEQ ID NO 516 | SEQ ID NO 517 | SEQ ID NO 518 | SEQ ID NO 519 | SEQ ID NO 520 |
| TSPYL1 | SEQ ID NO 521 | SEQ ID NO 522 | SEQ ID NO 523 | SEQ ID NO 524 | SEQ ID NO 525 |
| TSPYL1 | SEQ ID NO 526 | SEQ ID NO 527 | SEQ ID NO 528 | SEQ ID NO 529 | SEQ ID NO 530 |
| UBXD3 | SEQ ID NO 531 | SEQ ID NO 532 | SEQ ID NO 533 | SEQ ID NO 534 | SEQ ID NO 535 |
| UBXD3 | SEQ ID NO 536 | SEQ ID NO 537 | SEQ ID NO 538 | SEQ ID NO 539 | SEQ ID NO 540 |
| ZNF420 | SEQ ID NO 541 | SEQ ID NO 542 | SEQ ID NO 543 | SEQ ID NO 544 | SEQ ID NO 545 |
| ZNF420 | SEQ ID NO 546 | SEQ ID NO 547 | SEQ ID NO 548 | SEQ ID NO 549 | SEQ ID NO 550 |

### FIGURES

[0185] FIG. 1: Disease free survival depending on cg19176447 methylation.

[0186] FIG. 2: Disease free survival depending on cg23906291 methylation.

[0187] FIG. 3: Disease free survival depending on cg06740897 methylation.

[0188] FIG. 4: Disease free survival depending on cg07318658 methylation.

[0189] FIG. 5: Disease free survival depending on cg19510604 methylation.

[0190] FIG. 6: Disease free survival depending on combined methylation.

### EXAMPLES

### Patient Samples

### Cancer Patient/Cancer Samples/Clinical Data

[0191] Ovarian cancer samples were obtained from patients treated at the Department of Obstetrics and Gynaecology, Charite University Hospital, Campus Virchow, Berlin. Tumor tissue was snap frozen to −80° C. Patients gave their written informed consent and the study was approved by the local institutional review boards.

[0192] Patients with primary ovarian cancer of serous subtype (n=90) were selected who after debulking surgery received standard 1^{st} line therapy with carboplatin and paclitaxel or cisplatin and paclitaxel. All primary ovarian tumor specimens were inspected by independent pathologists who confirmed the original diagnosis, assessed the sample quality, and assessed the amount of tumor tissue, stromal tissue and normal tissue. Clinical data including base data, treatment data and follow-up data were available from all patients that were used for methylation analysis.

[0193] Other cancer samples and benign control samples and pathologically verified tissues were obtained from commercial sample collections done by Asterand (Detroit, Mich., USA).

### Sample Processing

[0194] DNA extraction was performed using QIAamp DNA Mini Kit, QIAGEN GmbH (Hilden, Germany) according to the manufacturer's instructions. Total genomic DNA of all samples was bisulfite treated, converting unmethylated cytosines to uracil. Methylated cytosines remained conserved. Bisulfite treatment was performed using the EZ-96 DNA Methylation-Gold Kit from Zymo Research (Orange, Calif. USA) according to the manufacturer's instructions. The bisulfite treated DNA was whole genome amplified via random hexamer priming and Phi29 DNA polymerase, enzymatically fragmented and hybridized to Illumina Infinium II BeadChips. Target preparation and microarray hybridization, washing, and scanning was performed according to the manufacturer's protocol (Illumina, Inc., San Diego, Calif., USA). The methylation values for each CpG dinucleotide were calculated from the raw data using the BeadStudio software (Illumina, Inc., San Diego, Calif., USA).

### Bioinformatics Methods

[0195] All calculations were made with the statistics software “R” in combination with its “Bioconductor” packages (http://www.bioconductor.org/about/index.html). R is a standard software for statistical computations from the open source project “The R Project for Statistical Computing” (http://cran.r-project.org/). The version of R used was 2.7.2, that of Bioconductor was 2.2.

[0196] All Kaplan-Meier estimates (Kaplan, E. L.; Meier, P.: Nonparametric estimation from incomplete observations. J. Amer. Statist. Assn. 53:457-481, 1958) of survival functions were produced by Bioconductor's package “survival” with the function “survfit”. Argument data were the disease-free survival data and the methylation measurements of a specific marker. The group of highly methylated samples for that marker (“MethHigh”) always consists of the 50% of samples with measurements above the median of all measurements for that marker.

[0197] For combined sequences, a weighted average of ranks of the measurements of the combined sequences is used as a combined measurement. The upper 50% of the combined measurements are seen as highly methylated. This is adapted as follows when combining sequences with reverse predictive qualities for survival, such as a sequence for which high methylation means longer survival and a sequence for which low methylation means longer survival. Then one of the sequence's measurements is ranked in reverse order before the forming of the average ranks These methods of combining two sequences are analogously extended to the combination of greater number of sequences. For the weighted average only equal weights were used in the example in this patent.

[0198] The logrank test (Mantel, Nathan (1966). “Evaluation of survival data and two new rank order statistics arising in its consideration.” Cancer Chemotherapy Reports 50 (3): 163-70. PMID 5910392) for differences between survival functions (that is, with a null hypothesis of equality between the survival functions) was computed by the function “survdiff” from the same package with the same arguments as “survfit” above.

[0199] Finally, the fit of the Cox proportional hazard model for multiple categorial factors was computed by the function “coxph” from the same package. Arguments were the disease free survival data for the available tumor samples, the median-based factor “MethHigh” explained above, the factorization of FIGO stage data into the class of cases with stage I or stage II and the class with stage III or IV (the latter being called “StageHigh”), and the factorization of tumor rest after surgery into the class of cases with no tumor rest and the class with some tumor rest (called “TumorRest”).

### Results

[0200] 1. Determining the Prognosis of a Subject with Ovarian Carcinoma Based on Methylation of the Ggene CLK3

[0201] The prognosis of a subject with ovarian carcinoma was determined using SEQ ID NO 1, which is part of the gene CLK3.

[0202] SEQ ID No 1 is present on the HumanMethylation27 BeadChip (Illumina© Infinium, http://www.illumina.com/products/infinium_humanmethylation27_beadchip_kits.ilmn) and identified as “cg19510604”. This CpG is present in the genomic sequences as SEQ ID NO 1, and as part of SEQ ID NO 6, and in close proximity to SEQ ID NO 11. A high correlation of methylation in all three sites is expected.

[0203] Fehler! Verweisquelle Konnte Nicht Gefunden Werden.

[0204] shows two Kaplan-Meier curves for disease free survival in months, the black curve corresponds to samples with a low methylation of cg19510604, the lighter curve corresponds to those with a high methylation. The cut-off point between high and low methylation was chosen to be the median of the 90 available tumor samples, with 45 samples in the low group (with 30 events) and 45 in the high group (with 9 events).

[0205] A logrank test for differences between the two survival curves results in a chi-square statistic for a test of equality of 24.4 on 1 degrees of freedom, p=7.89*10⁻⁷.

[0206] A Cox proportional hazard regression model for the three factors “high methylation of cg19510604”, “FIGO Stage III or IV”, “Tumor rest remaining after surgery” results in the following (Likelihood ratio test resulted in 29.4 on three degrees of freedom, p-Value of 1.83*10⁻⁶.):

| | Coef- | exp(Coef- | SE(Coef- | | |
|---|---|---|---|---|---|
| | ficient | ficient) | ficient) | Z-Score | p-Value |
| high | 1.529 | 4.61 | 0.404 | 3.782 | 0.00016 |
| Methylation | | | | | |
| Stage III or IV | 0.358 | 1.43 | 1.061 | 0.337 | 0.74000 |
| Tumor Rest | 0.807 | 2.24 | 0.341 | 2.363 | 0.01800 |

2. Determining the Prognosis of a Subject with Ovarian Carcinoma Based on the Methylation of the Gene MTMR4

[0207] The prognosis of a subject with ovarian carcinoma was determined using SEQ ID NO 16, which is part of the gene MTMR4.

[0208] SEQ ID NO 16 is present on the HumanMethylation27 BeadChip (Illumina© Infinium, http://www.illumina.com/products/infinium_humanmethylation27_beadchip_kits.ilmn) and identified as “cg07318658”. This CpG is present in the genomic sequences as SEQ ID NO 16, and as part of SEQ ID NO 21, and in close proximity to SEQ ID NOs 26, 31, and 36. A high correlation of methylation in all five sites is expected.

[0209] FIG. 2 shows two Kaplan-Meier curves for disease free survival in months, the black curve corresponds to samples with a low methylation of cg07318658, the lighter curve corresponds to those with a high methylation. The cut-off point between high and low methylation was chosen to be the median of the available tumor samples, with 45 samples in the low group (with 27 events) and 45 in the high group (with 12 events).

[0210] A logrank test for differences between the two survival curves results in a chi-square statistic for a test of equality of 18.0 on 1 degrees of freedom, p=2.2*10⁻⁵.

[0211] A Cox proportional hazard regression model for the three factors “high methylation of cg07318658”, “FIGO Stage III or IV”, “Tumor rest remaining after surgery” results in the following (Likelihood ratio test resulted in 31.0 on three degrees of freedom, p-Value of 8.67*10⁻⁶):

| | Coef- | exp(Coef- | SE(Coef- | | |
|---|---|---|---|---|---|
| | ficient | ficient) | ficient) | Z-Score | p-Value |
| high | 1.550 | 4.720 | 0.379 | 4.100 | 0.000041 |
| Methylation | | | | | |
| Stage III or IV | 1.130 | 3.110 | 1.018 | 1.110 | 0.27 |
| Tumor Rest | 1.170 | 3.220 | 0.344 | 3.400 | 0.00069 |

3. Determining the Prognosis of a Subject with Ovarian Carcinoma Based on Methylation of the Gene NFE2L1

[0212] The prognosis of a subject with ovarian carcinoma was determined using SEQ ID NO 41, which is part of gene NFE2L1.

[0213] SEQ ID NO 41 is present on the HumanMethylation27 BeadChip (Illumina© Infinium, http://www.illumina.com/products/infinium_humanmethylation27_beadchip_kits.ilmn) and identified as “cg06740897”. This CpG is present in the genomic sequences as SEQ ID NO 41, and as part of SEQ ID NO 46, and in close proximity to SEQ ID NOs 51, 56, and 61. A high correlation of methylation in all five sites is expected.

[0214] FIG. 3 shows two Kaplan-Meier curves for disease free survival in months, the black curve corresponds to samples with a low methylation of cg06740897, the lighter curve corresponds to those with a high methylation. The cut-off point between high and low methylation was chosen to be the median of the 90 available tumor samples, with 45 samples in the low group (with 13 events) and 45 in the high group (with 26 events).

[0215] A logrank test for differences between the two survival curves results in a chi-square statistic for a test of equality of 16.2 on 1 degrees of freedom, p=5.8*10⁻⁵.

[0216] A Cox proportional hazard regression model for the three factors “high methylation of cg 06740897”, “FIGO Stage III or IV”, “Tumor rest remaining after surgery” results in the following (Likelihood ratio test resulted in 24.8 on three degrees of freedom, p-Value of 1.74*10⁻⁵):

| | Coef- | exp(Coef- | SE(Coef- | | |
|---|---|---|---|---|---|
| | ficient | ficient) | ficient) | Z-Score | p-Value |
| high | 1.231 | 3.430 | 0.355 | 3.470 | 0.00052 |
| Methylation | | | | | |
| Stage III or IV | 1.386 | 4.000 | 1.015 | 1.370 | 0.17 |
| Tumor Rest | 0.897 | 2.450 | 0.339 | 2.640 | 0.0083 |

4. Determining the Prognosis of a Subject with Ovarian Carcinoma Based on Methylation of the Gene PERLD1

[0217] The prognosis of a subject with ovarian carcinoma was determined using SEQ ID NO 66, which is part of gene PERLD1.

[0218] SEQ ID NO 66 is present on the HumanMethylation27 BeadChip (Illumina© Infinium, http://www.illumina.com/products/infinium_humanmethylation27_beadchip_kits.ilmn) and identified as “cg23906291”. This CpG is present in the genomic sequences as SEQ ID NO 66, and as part of SEQ ID NOs 71, 76, 101, and 111, and in close proximity of SEQ ID NOs 81, 86, 91, 96, and 106. A high correlation of methylation in all five sites is expected.

[0219] FIG. 4 shows two Kaplan-Meier curves for disease free survival in months, the black curve corresponds to samples with a low methylation of cg23906291, the red curve corresponds to those with a high methylation. The cut-off point between high and low was chosen to be the median of the available 90 tumor samples, with 45 samples in the low group (with 13 events) and 45 in the high group (with 26 events).

[0220] A logrank test for differences between the two survival curves results in a chi-square statistic for a test of equality of 15.7 on 1 degrees of freedom, p=7.54*10⁻⁵.

[0221] A Cox proportional hazard regression model for the three factors “high methylation of cg23906291”, “FIGO Stage III or IV”, “Tumor rest remaining after surgery” results in the following (Likelihood ratio test resulted in 29.5 on three degrees of freedom, p-Value of 1.80*10⁻⁶):

| | Coef- | exp(Coef- | SE(Coef- | | |
|---|---|---|---|---|---|
| | ficient | ficient) | ficient) | Z-Score | p-Value |
| high | 1.460 | 4.300 | 0.362 | 4.030 | 0.00005.6 |
| Methylation | | | | | |
| Stage III or IV | 1.520 | 4.590 | 1.021 | 1.490 | 0.14 |
| Tumor Rest | 1.250 | 3.490 | 0.350 | 3.570 | 0.00035 |

5. Determining the Prognosis of a Subject with Ovarian Carcinoma Based on Methylation of the Gene AKAP2

[0222] The prognosis of a subject with ovarian carcinoma was determined using SEQ ID NO 116, which is part of gene AKAP2.

[0223] SEQ ID NO 116 is present on the HumanMethylation27 BeadChip (Illumina© Infinium, http://www.illumina.com/products/infinium_humanmethylation27_beadchip_kits.ilmn) and identified as “cg19176447”. This CpG is present in the genomic sequences as SEQ ID NO 116, as part of SEQ ID NO 121, and in close proximity of SEQ ID NOs 126 and 131. A high correlation of methylation in all five sites is expected.

[0224] FIG. 5 shows two Kaplan-Meier curves for disease free survival in months, the black (upper) curve corresponds to samples with a low methylation of cg19176447, the lower (lighter) curve corresponds to those with a high methylation. The cut-off point between high and low was chosen to be the median of the available 90 tumor samples, with 45 samples in the low group (with 11 events) and 45 in the high group (with 28 events).

[0225] A logrank test for differences between the two survival curves results in a chi-square statistic for a test of equality of 14.1 on 1 degrees of freedom, p=1.77*10⁻⁴.

[0226] A Cox proportional hazard regression model for the three factors “high methylation of cg19176447”, “FIGO Stage III or IV”, “Tumor rest remaining after surgery” results in the following (Likelihood ratio test resulted in 17.4 on three degrees of freedom, p-Value of 5.74*10⁻⁴):

| | Coef- | exp(Coef- | SE(Coef- | | |
|---|---|---|---|---|---|
| | ficient | ficient) | ficient) | Z-Score | p-Value |
| high Methyl. | 1.190 | 3.290 | 0.366 | 3.250 | 0.0011 |
| Stage III or IV | 1.447 | 4.250 | 1.015 | 1.430 | 0.15 |
| Tumor Rest | 0.872 | 2.390 | 0.342 | 2.550 | 0.011 |

6. Determining the Prognosis of a Subject with Ovarian Carcinoma Based on Methylation of Gene CLK3 and Gene MTMR4

[0227] The prognosis of a subject with ovarian carcinoma was determined using SEQ ID NO 1, which is part of gene CLK3 in combination with SEQ ID NO 16, which is part of gene MTMR4. Each of the sequences has further sequences in Table 1 that are expected to be closely correlated.

[0228] Specifically, genomic SEQ ID NO 1 and 16 were combined by ranking each sequence's methylation measurements from the HumanMethylation27 BeadChip (All measurements were performed using the Illumina© Infinium HumanMethylation27 BeadChip:http://www.illumina.com/products/infinium_{—}humanmethylation27_beadchip_kits.ilmn) and then averaging these ranks for each sample.

[0229] For the resulting average ranks the median is used as a divider between “MethLow” and “MethHigh” as above.

[0230] FIG. 6 shows two Kaplan-Meier curves for disease free survival in months, the black curve corresponds to samples with a low combined methylation, the lighter curve corresponds to those with a high methylation. The cut-off point between high and low methylation was chosen to be the median of the 90 available tumor samples, with 45 samples in the low group (with 11 events) and 45 in the high group (with 28 events).

[0231] A logrank test for differences between the two survival curves results in a chi-square statistic for a test of equality of 21.9 on 1 degrees of freedom, p=2.91*10-6.

[0232] A Cox proportional hazard regression model for the three factors “high average rank of methylation”, “FIGO Stage III or IV”, “Tumor rest remaining after surgery” results in the following (likelihood ratio test resulted in 17.4 on three degrees of freedom, p-Value of 5.74*10-4.):

| | Coef- | exp(Coef- | SE(Coef- | | |
|---|---|---|---|---|---|
| | ficient | ficient) | ficient) | Z-Score | p-Value |
| high | 1.395 | 4.03 | 0.39 | 3.758 | 0.00035 |
| average Rank | | | | | |
| Stage III or IV | 0.821 | 2.27 | 1.025 | 0.801 | 0.42 |
| Tumor Rest | 0.707 | 2.03 | 0.345 | 2.047 | 0.041 |

The application's sequence listing, which the Patent Office published only in electronic form, follows.

SEQUENCE LISTING (550 sequences)

SEQ ID NO: 1 - DNA, 50 bp, homo sapiens
cgctcctggttgtcacattctggctcttttatggggtgggaaatctttca

SEQ ID NO: 2 - DNA, 50 bp, homo sapiens
cgtttttggttgttatattttggtttttttatggggtgggaaatttttta

SEQ ID NO: 3 - DNA, 50 bp, homo sapiens
tgtttttggttgttatattttggtttttttatggggtgggaaatttttta

SEQ ID NO: 4 - DNA, 50 bp, homo sapiens
tgaaagattttttattttataaaagagttagaatgtgataattaggagcg

SEQ ID NO: 5 - DNA, 50 bp, homo sapiens
tgaaagattttttattttataaaagagttagaatgtgataattaggagtg

SEQ ID NO: 6 - DNA, 3001 bp, homo sapiens
acaggatcctgctgctgcagacagaagtggaaaaggcctagcggcatttggaccaaatgacccaacagcctgttggcccagagcccagcctggggatcccccaagtgggtgcatggcaggccctgcgcactggccctgctgtacctttgactctgccccacactttattctctggtcctcattattgaagcattatctagagaaggaaggcagcgcaggggcttagtccagccaagagagggatcctcttccaacatttgggaataccctgggatcattcagtgacttccctcctggttcagatgggaaaactgagaccagagagcagaggagagcttgttcagagtcataacttgagttggggccaggaccctgccacaacatgccctgaggcatcaacggtctgccaagaccaccccagtgtggtctggaagctggaaggagaccccaggattctggaccaagtgtatctacaggagatgctggtgccaggcctgcagatccaagagcagagctgggatggaggcagggcccaggagcttcgggacccagagtctccatgccagcagctgagacccctgcccaggctcaggacacagtccgtctgcaggagcagttgctgatactcactgaggttggtcaagacagctggcaggggcagccccacaggaaagggaatctgggcattagctgatccaggccatgcccatctgtaccagggggcagaggcaagggagcctgggccccattcctgggggattccaatgtagggcaaggggctctaggggcacagaggaaaggagaatgaccaggagagagagattctagcagggcgtccacacagtgacactccagagagcaccatcctcatcttcacataactggcccccctgctagtgtgcagccaggcactggtccagagtcgtagcctggagtgtagagaagcctctgcgggctggggtggtcagagaggcctcctggaagggctgagacccagaggaagtggagttcggggcctctgaggaggggctgcatgggtaaaggctggagctccacaaccctggtggaggctgagccacaactcggtggggtggggatctccccaggtgaacaagagactcagaagagctgggccagagccaccagcaactaggggcctgcttggagcagctgcagcatctgcagggagagcagatggtgttggggggccattgcaggccctggaggcagagcacacctggctacttcaggagaaggtggggctgctagcagcactgggtgtggccccgggccaagagtcctggtaggtggctgcttgggcccatcctcagagtgtccaagccaggctggggtgggggctctgttctcactgtaggtgagatggccctctcagcaggcggtgggccagtctctgtcaccagctggctgagggggaatggcccagagccctaaacccggaatcacacgaccagagccagtctcccttccccaggtatcagcgctcctggttgtcacattctggctcttttatggggtgggaaatctttcagcttcaagaagtcctgtctcgcctacatatggccaagcccctcctgctggcccaggggcaggtgggaggtgggggtgagatgaccttagctgctgggtgcaagtcagggtccttgggagtagaagtgcccagtacaaaggggttctgtgtgtgcagggagccatgaaagaggcatctctgccccactccccctcctagttcataagacaataatcactgaaagggagtggggtgggggtgatctggggtccatgctgtacctggactgcaccatttcttccagtacactccaggtcctggaggtaccagtgcccctcaggaaagagctagaggcacaagaatcacatcccaggcttcatgaggagatggctgaatattggaaggcacgctggcaccggctggcagttgccctgaaatttaaagaggaggaactgcagagactccagaggcagagtgggacctggcctccccaggtgggcactgtctcccaccttcttctccaccccctcaaccccgttctccccattgtcttccccactgcccagtctttcccatacaaaccaattagtctcttacccctccttaggatgcccccatcttgatcctatacttccttcccattttctgcctcttcctcatcatgccccatcattctccatccatgttttcagcatgcatttattgagcatctgctacatgcctggccctcttctgtgtgcagaagcaatgtcaaatcagatcactccttgtcctcaacagcttatggtttgggggcacccggtaattgagtaagcaattatttatttattattgattgatttataatcgattgattgattgcatcagggtctctgtcacccagactgaggtgcagtggtgcaatcataactcactgcagcttcaaactcctggactcaagcgatcctcctgcctcaggtagctgggactgcaggcacgcatcaccatgcctggctaagtttttttttttttttttttttttgtagagatgggggtctcactacattgcccagggtggtcttgaacttctgaccctcaagcagttctcccaccttggcctcccaaagttctgagactacaggcatgaaccactgtgcctattttgcaagtaataatttaatgtgccagatgagggaagaggcacagtgggagctggttaaggggtggcagataggagagtccctcccagagaaggggtttctgagcctctgaaccctcacacaaggatagacaggcattttccaggaggagagaggaaatgaagggcatttcagcaagaggaaactgcacatacatatacccagagagacaggggaggagtgttgtaaatagcccctgatccacttgagaaggagagtgggtgagggggttactatggacatgggacaggggccagatctagggtttagatgtcccagctcctgtccacctgac

SEQ ID NO: 7 - DNA, 3001 bp, homo sapiens
ataggattttgttgttgtagatagaagtggaaaaggtttagcggtatttggattaaatgatttaatagtttgttggtttagagtttagtttggggattttttaagtgggtgtatggtaggttttgcgtattggttttgttgtatttttgattttgttttatattttattttttggtttttattattgaagtattatttagagaaggaaggtagcgtaggggtttagtttagttaagagagggatttttttttaatatttgggaatattttgggattatttagtgattttttttttggtttagatgggaaaattgagattagagagtagaggagagtttgtttagagttataatttgagttggggttaggattttgttataatatgttttgaggtattaacggtttgttaagattattttagtgtggtttggaagttggaaggagattttaggattttggattaagtgtatttataggagatgttggtgttaggtttgtagatttaagagtagagttgggatggaggtagggtttaggagtttcgggatttagagtttttatgttagtagttgagatttttgtttaggtttaggatatagttcgtttgtaggagtagttgttgatatttattgaggttggttaagatagttggtaggggtagttttataggaaagggaatttgggtattagttgatttaggttatgtttatttgtattagggggtagaggtaagggagtttgggttttatttttgggggattttaatgtagggtaaggggttttaggggtatagaggaaaggagaatgattaggagagagagattttagtagggcgtttatatagtgatattttagagagtattatttttatttttatataattggtttttttgttagtgtgtagttaggtattggtttagagtcgtagtttggagtgtagagaagtttttgcgggttggggtggttagagaggttttttggaagggttgagatttagaggaagtggagttcggggtttttgaggaggggttgtatgggtaaaggttggagttttataattttggtggaggttgagttataattcggtggggtggggatttttttaggtgaataagagatttagaagagttgggttagagttattagtaattaggggtttgtttggagtagttgtagtatttgtagggagagtagatggtgttggggggttattgtaggttttggaggtagagtatatttggttattttaggagaaggtggggttgttagtagtattgggtgtggtttcgggttaagagttttggtaggtggttgtttgggtttatttttagagtgtttaagttaggttggggtgggggttttgtttttattgtaggtgagatggtttttttagtaggcggtgggttagtttttgttattagttggttgagggggaatggtttagagttttaaattcggaattatacgattagagttagttttttttttttaggtattagcgtttttggttgttatattttggtttttttatggggtgggaaattttttagttttaagaagttttgtttcgtttatatatggttaagttttttttgttggtttaggggtaggtgggaggtgggggtgagatgattttagttgttgggtgtaagttagggtttttgggagtagaagtgtttagtataaaggggttttgtgtgtgtagggagttatgaaagaggtatttttgttttatttttttttttagtttataagataataattattgaaagggagtggggtgggggtgatttggggtttatgttgtatttggattgtattattttttttagtatattttaggttttggaggtattagtgttttttaggaaagagttagaggtataagaattatattttaggttttatgaggagatggttgaatattggaaggtacgttggtatcggttggtagttgttttgaaatttaaagaggaggaattgtagagattttagaggtagagtgggatttggtttttttaggtgggtattgttttttatttttttttttatttttttaatttcgttttttttattgttttttttattgtttagttttttttatataaattaattagttttttatttttttttaggatgtttttattttgattttatattttttttttattttttgttttttttttattatgttttattattttttatttatgtttttagtatgtatttattgagtatttgttatatgtttggtttttttttgtgtgtagaagtaatgttaaattagattattttttgtttttaatagtttatggtttgggggtattcggtaattgagtaagtaattatttatttattattgattgatttataatcgattgattgattgtattagggtttttgttatttagattgaggtgtagtggtgtaattataatttattgtagttttaaatttttggatttaagcgatttttttgttttaggtagttgggattgtaggtacgtattattatgtttggttaagtttttttttttttttttttttttgtagagatgggggttttattatattgtttagggtggttttgaatttttgatttttaagtagtttttttattttggttttttaaagttttgagattataggtatgaattattgtgtttattttgtaagtaataatttaatgtgttagatgagggaagaggtatagtgggagttggttaaggggtggtagataggagagttttttttagagaaggggtttttgagtttttgaatttttatataaggatagataggtattttttaggaggagagaggaaatgaagggtattttagtaagaggaaattgtatatatatatatttagagagataggggaggagtgttgtaaatagtttttgatttatttgagaaggagagtgggtgagggggttattatggatatgggataggggttagatttagggtttagatgttttagtttttgtttatttgat

SEQ ID NO: 8 - DNA, 3001 bp, homo sapiens
ataggattttgttgttgtagatagaagtggaaaaggtttagtggtatttggattaaatgatttaatagtttgttggtttagagtttagtttggggattttttaagtgggtgtatggtaggttttgtgtattggttttgttgtatttttgattttgttttatattttattttttggtttttattattgaagtattatttagagaaggaaggtagtgtaggggtttagtttagttaagagagggatttttttttaatatttgggaatattttgggattatttagtgattttttttttggtttagatgggaaaattgagattagagagtagaggagagtttgtttagagttataatttgagttggggttaggattttgttataatatgttttgaggtattaatggtttgttaagattattttagtgtggtttggaagttggaaggagattttaggattttggattaagtgtatttataggagatgttggtgttaggtttgtagatttaagagtagagttgggatggaggtagggtttaggagttttgggatttagagtttttatgttagtagttgagatttttgtttaggtttaggatatagtttgtttgtaggagtagttgttgatatttattgaggttggttaagatagttggtaggggtagttttataggaaagggaatttgggtattagttgatttaggttatgtttatttgtattagggggtagaggtaagggagtttgggttttatttttgggggattttaatgtagggtaaggggttttaggggtatagaggaaaggagaatgattaggagagagagattttagtagggtgtttatatagtgatattttagagagtattatttttatttttatataattggtttttttgttagtgtgtagttaggtattggtttagagttgtagtttggagtgtagagaagtttttgtgggttggggtggttagagaggttttttggaagggttgagatttagaggaagtggagtttggggtttttgaggaggggttgtatgggtaaaggttggagttttataattttggtggaggttgagttataatttggtggggtggggatttttttaggtgaataagagatttagaagagttgggttagagttattagtaattaggggtttgtttggagtagttgtagtatttgtagggagagtagatggtgttggggggttattgtaggttttggaggtagagtatatttggttattttaggagaaggtggggttgttagtagtattgggtgtggttttgggttaagagttttggtaggtggttgtttgggtttatttttagagtgtttaagttaggttggggtgggggttttgtttttattgtaggtgagatggtttttttagtaggtggtgggttagtttttgttattagttggttgagggggaatggtttagagttttaaatttggaattatatgattagagttagttttttttttttaggtattagtgtttttggttgttatattttggtttttttatggggtgggaaattttttagttttaagaagttttgttttgtttatatatggttaagttttttttgttggtttaggggtaggtgggaggtgggggtgagatgattttagttgttgggtgtaagttagggtttttgggagtagaagtgtttagtataaaggggttttgtgtgtgtagggagttatgaaagaggtatttttgttttatttttttttttagtttataagataataattattgaaagggagtggggtgggggtgatttggggtttatgttgtatttggattgtattattttttttagtatattttaggttttggaggtattagtgttttttaggaaagagttagaggtataagaattatattttaggttttatgaggagatggttgaatattggaaggtatgttggtattggttggtagttgttttgaaatttaaagaggaggaattgtagagattttagaggtagagtgggatttggtttttttaggtgggtattgttttttatttttttttttatttttttaattttgttttttttattgttttttttattgtttagttttttttatataaattaattagttttttatttttttttaggatgtttttattttgattttatattttttttttattttttgttttttttttattatgttttattattttttatttatgtttttagtatgtatttattgagtatttgttatatgtttggtttttttttgtgtgtagaagtaatgttaaattagattattttttgtttttaatagtttatggtttgggggtatttggtaattgagtaagtaattatttatttattattgattgatttataattgattgattgattgtattagggtttttgttatttagattgaggtgtagtggtgtaattataatttattgtagttttaaatttttggatttaagtgatttttttgttttaggtagttgggattgtaggtatgtattattatgtttggttaagtttttttttttttttttttttttgtagagatgggggttttattatattgtttagggtggttttgaatttttgatttttaagtagtttttttattttggttttttaaagttttgagattataggtatgaattattgtgtttattttgtaagtaataatttaatgtgttagatgagggaagaggtatagtgggagttggttaaggggtggtagataggagagttttttttagagaaggggtttttgagtttttgaatttttatataaggatagataggtattttttaggaggagagaggaaatgaagggtattttagtaagaggaaattgtatatatatatatttagagagataggggaggagtgttgtaaatagtttttgatttatttgagaaggagagtgggtgagggggttattatggatatgggataggggttagatttagggtttagatgttttagtttttgtttatttgat

SEQ ID NO: 9 - DNA, 3001 bp, homo sapiens
gttaggtggataggagttgggatatttaaattttagatttggtttttgttttatgtttatagtaatttttttatttatttttttttttaagtggattaggggttatttataatattttttttttgtttttttgggtatatgtatgtgtagtttttttttgttgaaatgttttttattttttttttttttttggaaaatgtttgtttatttttgtgtgagggtttagaggtttagaaattttttttttgggagggatttttttatttgttattttttaattagtttttattgtgtttttttttttatttggtatattaaattattatttgtaaaataggtatagtggtttatgtttgtagttttagaattttgggaggttaaggtgggagaattgtttgagggttagaagtttaagattattttgggtaatgtagtgagatttttatttttataaaaaaaaaaaaaaaaaaaaaaatttagttaggtatggtgatgcgtgtttgtagttttagttatttgaggtaggaggatcgtttgagtttaggagtttgaagttgtagtgagttatgattgtattattgtattttagtttgggtgatagagattttgatgtaattaattaatcgattataaattaattaataataaataaataattgtttatttaattatcgggtgtttttaaattataagttgttgaggataaggagtgatttgatttgatattgtttttgtatatagaagagggttaggtatgtagtagatgtttaataaatgtatgttgaaaatatggatggagaatgatggggtatgatgaggaagaggtagaaaatgggaaggaagtataggattaagatgggggtattttaaggaggggtaagagattaattggtttgtatgggaaagattgggtagtggggaagataatggggagaacggggttgagggggtggagaagaaggtgggagatagtgtttatttggggaggttaggttttattttgtttttggagtttttgtagttttttttttttaaattttagggtaattgttagtcggtgttagcgtgttttttaatatttagttatttttttatgaagtttgggatgtgatttttgtgtttttagtttttttttgaggggtattggtatttttaggatttggagtgtattggaagaaatggtgtagtttaggtatagtatggattttagattatttttattttatttttttttagtgattattgttttatgaattaggagggggagtggggtagagatgttttttttatggttttttgtatatatagaatttttttgtattgggtatttttatttttaaggattttgatttgtatttagtagttaaggttattttatttttattttttatttgtttttgggttagtaggaggggtttggttatatgtaggcgagataggattttttgaagttgaaagattttttattttataaaagagttagaatgtgataattaggagcgttgatatttggggaagggagattggttttggtcgtgtgatttcgggtttagggttttgggttatttttttttagttagttggtgatagagattggtttatcgtttgttgagagggttattttatttatagtgagaatagagtttttattttagtttggtttggatattttgaggatgggtttaagtagttatttattaggatttttggttcggggttatatttagtgttgttagtagttttatttttttttgaagtagttaggtgtgttttgtttttagggtttgtaatggttttttaatattatttgttttttttgtagatgttgtagttgttttaagtaggtttttagttgttggtggttttggtttagtttttttgagttttttgtttatttggggagatttttattttatcgagttgtggtttagtttttattagggttgtggagttttagtttttatttatgtagtttttttttagaggtttcgaattttattttttttgggttttagtttttttaggaggtttttttgattattttagttcgtagaggtttttttatattttaggttacgattttggattagtgtttggttgtatattagtaggggggttagttatgtgaagatgaggatggtgttttttggagtgttattgtgtggacgttttgttagaattttttttttttggttattttttttttttttgtgtttttagagttttttgttttatattggaattttttaggaatggggtttaggtttttttgtttttgttttttggtatagatgggtatggtttggattagttaatgtttagatttttttttttgtggggttgtttttgttagttgttttgattaattttagtgagtattagtaattgtttttgtagacggattgtgttttgagtttgggtaggggttttagttgttggtatggagattttgggtttcgaagtttttgggttttgtttttattttagttttgtttttggatttgtaggtttggtattagtattttttgtagatatatttggtttagaattttggggtttttttttagtttttagattatattggggtggttttggtagatcgttgatgttttagggtatgttgtggtagggttttggttttaatttaagttatgattttgaataagtttttttttgttttttggttttagtttttttatttgaattaggagggaagttattgaatgattttagggtatttttaaatgttggaagaggattttttttttggttggattaagtttttgcgttgttttttttttttagataatgttttaataatgaggattagagaataaagtgtggggtagagttaaaggtatagtagggttagtgcgtagggtttgttatgtatttatttgggggatttttaggttgggttttgggttaataggttgttgggttatttggtttaaatgtcgttaggttttttttatttttgtttgtagtagtaggattttgt

SEQ ID NO: 10 - DNA, 3001 bp, homo sapiens
gttaggtggataggagttgggatatttaaattttagatttggtttttgttttatgtttatagtaatttttttatttatttttttttttaagtggattaggggttatttataatattttttttttgtttttttgggtatatgtatgtgtagtttttttttgttgaaatgttttttattttttttttttttttggaaaatgtttgtttatttttgtgtgagggtttagaggtttagaaattttttttttgggagggatttttttatttgttattttttaattagtttttattgtgtttttttttttatttggtatattaaattattatttgtaaaataggtatagtggtttatgtttgtagttttagaattttgggaggttaaggtgggagaattgtttgagggttagaagtttaagattattttgggtaatgtagtgagatttttatttttataaaaaaaaaaaaaaaaaaaaaaatttagttaggtatggtgatgtgtgtttgtagttttagttatttgaggtaggaggattgtttgagtttaggagtttgaagttgtagtgagttatgattgtattattgtattttagtttgggtgatagagattttgatgtaattaattaattgattataaattaattaataataaataaataattgtttatttaattattgggtgtttttaaattataagttgttgaggataaggagtgatttgatttgatattgtttttgtatatagaagagggttaggtatgtagtagatgtttaataaatgtatgttgaaaatatggatggagaatgatggggtatgatgaggaagaggtagaaaatgggaaggaagtataggattaagatgggggtattttaaggaggggtaagagattaattggtttgtatgggaaagattgggtagtggggaagataatggggagaatggggttgagggggtggagaagaaggtgggagatagtgtttatttggggaggttaggttttattttgtttttggagtttttgtagttttttttttttaaattttagggtaattgttagttggtgttagtgtgttttttaatatttagttatttttttatgaagtttgggatgtgatttttgtgtttttagtttttttttgaggggtattggtatttttaggatttggagtgtattggaagaaatggtgtagtttaggtatagtatggattttagattatttttattttatttttttttagtgattattgttttatgaattaggagggggagtggggtagagatgttttttttatggttttttgtatatatagaatttttttgtattgggtatttttatttttaaggattttgatttgtatttagtagttaaggttattttatttttattttttatttgtttttgggttagtaggaggggtttggttatatgtaggtgagataggattttttgaagttgaaagattttttattttataaaagagttagaatgtgataattaggagtgttgatatttggggaagggagattggttttggttgtgtgattttgggtttagggttttgggttatttttttttagttagttggtgatagagattggtttattgtttgttgagagggttattttatttatagtgagaatagagtttttattttagtttggtttggatattttgaggatgggtttaagtagttatttattaggatttttggtttggggttatatttagtgttgttagtagttttatttttttttgaagtagttaggtgtgttttgtttttagggtttgtaatggttttttaatattatttgttttttttgtagatgttgtagttgttttaagtaggtttttagttgttggtggttttggtttagtttttttgagttttttgtttatttggggagatttttattttattgagttgtggtttagtttttattagggttgtggagttttagtttttatttatgtagtttttttttagaggttttgaattttattttttttgggttttagtttttttaggaggtttttttgattattttagtttgtagaggtttttttatattttaggttatgattttggattagtgtttggttgtatattagtaggggggttagttatgtgaagatgaggatggtgttttttggagtgttattgtgtggatgttttgttagaattttttttttttggttattttttttttttttgtgtttttagagttttttgttttatattggaattttttaggaatggggtttaggtttttttgtttttgttttttggtatagatgggtatggtttggattagttaatgtttagatttttttttttgtggggttgtttttgttagttgttttgattaattttagtgagtattagtaattgtttttgtagatggattgtgttttgagtttgggtaggggttttagttgttggtatggagattttgggttttgaagtttttgggttttgtttttattttagttttgtttttggatttgtaggtttggtattagtattttttgtagatatatttggtttagaattttggggtttttttttagtttttagattatattggggtggttttggtagattgttgatgttttagggtatgttgtggtagggttttggttttaatttaagttatgattttgaataagtttttttttgttttttggttttagtttttttatttgaattaggagggaagttattgaatgattttagggtatttttaaatgttggaagaggattttttttttggttggattaagtttttgtgttgttttttttttttagataatgttttaataatgaggattagagaataaagtgtggggtagagttaaaggtatagtagggttagtgtgtagggtttgttatgtatttatttgggggatttttaggttgggttttgggttaataggttgttgggttatttggtttaaatgttgttaggttttttttatttttgtttgtagtagtaggattttgt

SEQ ID NO: 11 - DNA, 7222 bp, homo sapiens
gccatggtggagctggcagagatttaggggatactaaacacccctacaaatcacgccttgaaaccccccgtttcagggagagccgctggcgaaggacttgatgcgcagccgcagctcggaagcggggggctcccctgcgacacctccccgcttcaggggcgggcccagacccgcggggaggggcatgggcggggccgcggctggctggcggccgccggggcggtgctggggaaacccttggcgcccccgcggagcggtcccaaggagggggcggtgcctggagggatggtccgccccgactgcgggtttctagccctcgcgtggcgtggggacaattaggcgccacgccctgtcgcttcactgcgcgacgctcgcgaggccggggacgccactcccagaccgggcgggacgcgcacgctcacagtgaggtctcaaaagatccccacctcagttttctcatctggaaagtggggcctcgtaatcctgtccgacccggcgcgggacagtaggtgtcagggattttggtgaccccacgctcgaggcctctgcaaaagggggctgtccagtggcccagagacgcagccggcggggcttttgtctagcgggggagtcttaactgagaggccacgcaggccggcaggaagccgctccacaggagggggctcaaggagaggggatctcctccctccagactccggccccgccagagtagctctagggtatcttcccagaaactgccccgcacgcactggcgagctgggagcgccaccacggctttcaaaaaacccgcacacaccaagataataatgtgtcgttcgctcgtttcgcgcaagcggagtcgcgtccgccttcccgagctccggcacacagacctcaggccgctctcgcgctctccggggccccgagaacaatgcccgtcctctccgcgcgcaggagggagttggcggaccacgcggggtcggggcgacggagcgggcccagccccacggccaggtcggggccccacctctcggctctgagagcccagccggcccgggccgcgcacctgtcaggtcgggggacctacgtgcgccgcgacacggcgggaggcgggccgggccaggctcgtcccctcggccctcccggaactagtctcctaggccgcggcgcccgccggagcggagagggctggtgccccggagccttcgagtcgggggctagagcggccaggcctccgagccgggtcgagccgaggctggcgacggctgcgtcacgcgagggggcggggctgccacgggcggaggtcgcagccggaagcggaagaggcgctcggagcggggagtggggcctagctgcagccggagcctgggagacggtaagtgtgggctggggtccgcggcggcgacagcggcggcggcggccgggggtgagtcggcggggcaggcgcgctggtgccattcggtctcggcctactccctttctttctcctcttcggcccatatcgggccgcgacctctcacccctgacccgctgcttctgccccggagggcggtcactgcagaccctgacctcgaccccacggtgttgaaggcggagcctgaacggcctctggggccgctcaagggtccagtttgggctctgtgcctgcccgcggaatggggtcggggtccgacgtagaagagccagagaagcccttcagacccctcccctacccctggcttcaggcttagtccgcagatgactcctcccttggcggcctggagtttgattctggcccagtccggctttccctctgtccccgggtctcccctcggcgccactggtggcggttacaggggatgggactctgagaccccctgggacctggggcggcaggaagggacgcgaacgagggcgcaggctcccctgtgtgttttgttgtggtggtagagccactccagcccggaggatgggctaggccaagctgacagttcaaatcccctggctgctcctccgtcccgcccgggagtctctagctttagttccgggtgtgggtgccctgatgtggagctggggtggaaattgcctgaaccaggcccccatcagaggcggagttggcggccttccagcttcccttcttgatgcccttgaaaaggaggagcgtttcaccgttggtggtggaggcttgcgaggtggcaggtttgaggttgcagtggtagggcagtccagccaaaaataaccatgggtgctggggtggctggaatccgggagggcagccgctgacctggctggctgcacttctagtcagcccagttctctggccaggaacagcaaatgagaagccgacaaggcctgtgctcaaagttgacatccttggcttggttttcttcatatcacctttttcctcattgtgcagagcagagcttcccaaagcataattgtggcctttagctgctttttaaacaagctgtttgctgaggttttcgagaatcagagataattgagaaatgggccctagagccctggctgggaggatgatatctgctatttccaatattttacttgcctagaatgtgttaaaggaaggatactcttctctgttattgctttgtgtgtggtaccttataactctcatgcttgtcatctcttttgccaggctgagagatgttatctccattttccaggcatgctaaccaaggcctagagtgacttgtctaaggtcatgaggctggtatgtgacagcactaggatttagtttagttttctgccagagctcttgcctcccagtttccttggaagggacttataaaatgtctgtaaggcatttaacacagccctgaagtgttacctggaactttcagatgttcatgaaaagctgccactagtacctctgtgggcacaaagctgtgctaggcatttcacttataggagagagatatttaatcctcacagaaccttgtaagagattactattcccttgttgcaagatgaagctgacggtcagagtagtgtaataatttgttcaaaggcacacagctagaagtggcaagccatgattcagattgacatctatatgactctgaaattttgttttccattgatgtgaatatgtatggacataagaatcttctaggtcccaggaggtagtctttggcgtggtgtgactgtgactgtgtcctccagctctggtgtttgtctgcccagtgaggatgggcaggaccatacttgccttgtggcacgacatgtgccctggccaatagagcatcttctgggtcaattagtggggtgtgagttcctgctttcattccatagcttgggcacctgacccagagtaattgcaggaaaacagtgaaatattagtcagctgattaccaaaacaacaaatctaagcttttggggaggtgatttcacaaaatatttatctccaaagacttcccaggtacacgggggaagacaagttagtggggagatggagggctttcttagggacacggagaggctcccaggggtttggtcacataggcctcactgtcctgctcaagcatggggagctgttctatgctgcttttctcctgacagaccctgctggtgagatggggcagcctcagtgggtttgtacaaaatgtgcttggccaggcaagctcaggactgaccatgactggaggttggctgtggccaagtgtgagtgttgggaagaaggctggctccatggaggcagtcagggattgacgtatgggtggagcaggttgctggcctcacatggccagctttctccgctggtggcagatccagcctggcaatttcatttggtggatataagtcctcactgaacagggatagtgaggtggggctcttttacctgccagatggctaaccctctggctatcctgggataggcggagggtaggatactagagccagagagctagaagaagggacagtaacggtactgttggataaaggcaaggcacctggcagggcactgtgggggtctaaaagggtgctaaatgggcctctggaaagaaagttagatgcgctgggtccacgtccccttgggttgaccctcaggagggctatggaatgtttgtgaggcctgtgtgcctctttctccaagggctgctcttctagtctcttgtggctcctcatgctcacttgtggtccttactcccttgagtggggtccagttcagggccctagccagacagcgttcagcttctcaaacttgagggctttgagccctcgcctcctgtgtacagccctttgcctggcctttggctttacagagcattcacttcacgggaccgcccccccgggcgggagggaatagagtgcaggaggctcccctttctcctgcctttgatctccctgtggtagtgttcaccgtccccacccagggttactgcctcagcccctggccctggctcacccagttccctgagcacccaggccaccaggctagtgatgctctgctgggagctgtttgtttgttcactggcagagaaagttgtttcctattgtctgctgtttgaccagtgtgacctcagagttcttcttcacttcataaacctctgggaggggccgccttcaaacagaacaatgggcctcttcaggagcaaccgggaagccccagcagccccatggctggaggtggctggctgtgtgtttagcagggctctctgttcctcgtggcctagatgcatcactgtaagcgataccgctcccctgaaccagacccgtacctgagctaccgatggaagaggaggaggtcctacagtcgggaacatgaagggagactgcgatacccgtcccgaagggagcctcccccacgaagatctcggtccagaaggtgagagggaactagataggagggaaagactccttctgtcagctgggctcagctgtggcagctccagactccttgagatgactccatccctgcccagctgtccctggatccctgccctgtcctctttgggctcctccactaacctcacctgcatgccttggcctcagcagtagctaccatccttgccgcccactctttctctgtcttggagtgccttttcttctccccacacattcccccattttctaggccagcatctttccgcttaacctcctaagccttccttggtgaggattaggaacataacctcacccctggaaagtttgctccctgggcctatcttagctcccaggtcaaacttagagttgcagcaggccacagggaactctggaagggtatagaacccttggaggcactctaccatactccccttcccctgtacccctcctcctacagctggaggatgctgtcgttggacagggctctggagggcgggcttagtacctttgcaccctcccctctctgcccacttcccaccagtgtggatgcttttagcacaggctgtccccctttagccctttacagtggccttaccacaggtctcttgcttgctaacagcaaggacccagctgaccagcgtccccatcccccttttggcagccatgaccgcctgccctaccagaggaggtaccgggagcgccgtgacagcgatacataccggtgtgaagagcggagcccatcctttggagaggactactatggaccttcacgttctcgtcatcgtcggcgatcgcgggagagggggccataccggacccgcaagcatgcccaccactgccacaaacgccgcaccaggtcttgtagcagcgcctcctcggtgagtggtagccagagtgtgctggctggggcttaaaggcctcatctcttcctagccttctctcaggctggctggtccgggtgagtactgccagccctgtgcacgtgcactggtgtgcgtgcatgtgtgtgtgtatgtgttgtctggtccaggtgtagggctgatcacagggtcctggcctctgtgtcttctggctctttccagtggcaactgtaggaactctggctccgatgctggctggcccctggcctgtctatgtctacacagtgctccagacaaaggccacgtggtgcaagtggctggggacacttcttaggacacttcttagggatcctagtagagtggctggtatggtggtctgcagctatatggcctggtccttcccacccagagactgcctcctcgtgtaactgagtgctctgatgtggactgcacccacctctgcgtctcatctgcacaccccttcccaaaggcccccagtctggagtgcctcacaggaccggaggatttgcctgtcagccagctcagactgggaacttcccttctgatctccagccaggccctctccagccgagcctctttacgaggggcagtcgcggtgaggaggggcaggtgcctgtgtgatggggcatgtgaagaaatggcagaaaggctgccgccccaggcctcgtccagttgcaggccacatgcccagagcagggcctggccagtattcctagcatggagggttgtaaggtctctggagcccacattgcgctcagtcccctggggaagcaaagccagttgtgtatttccgaggttacgtgcggtcttctcttctcccccatccctcttccctgcctccctcctgccggccttgaggcccctgaggagcagtggagaggccaggtgtcttctctgcccagcgctttctgtgacttctttgagtggctacaggttgagggttgactgtgcgggcgattgcagcgtggccctttcacctctttgcacactgccacatgctgccacaggatggcagtgcaggtctggctctgtttctctgtttggtgccctctatcgatcgtcgtgaggcttgggatgggcctagattgtgagcagcatgggtgccaaggccagggcaggagctggcatggggcctgtgtgggccattgtggtaggaagcctggcagtcgactggcccagaggatcccaggctgctttccttcttgaggctggtggcaggagggctgctgacggaaggctgtttctggtagtgatggtgaaatctggccaaggatgccgtctggaggcaggtagcagcttggctgtgagtggcagctgtcaggcatgtgcaagtctgcgtgggcgaacagaggcaggcaaggacaggctgggcattctgcagctgaagccggagcagccgctgaccagtctggatggttggacccaggcggggccagctgccttcttgcgccgccgttctcactgcatcttccgctctggcccaaagccacatgggagggtctgggagggagagactcggaggaggaggaggagggagt

SEQ ID NO: 12 - DNA, 7222 bp, homo sapiens
gttatggtggagttggtagagatttaggggatattaaatatttttataaattacgttttgaaatttttcgttttagggagagtcgttggcgaaggatttgatgcgtagtcgtagttcggaagcggggggtttttttgcgatattttttcgttttaggggcgggtttagattcgcggggaggggtatgggcggggtcgcggttggttggcggtcgtcggggcggtgttggggaaatttttggcgttttcgcggagcggttttaaggagggggcggtgtttggagggatggttcgtttcgattgcgggtttttagttttcgcgtggcgtggggataattaggcgttacgttttgtcgttttattgcgcgacgttcgcgaggtcggggacgttatttttagatcgggcgggacgcgtacgtttatagtgaggttttaaaagatttttattttagtttttttatttggaaagtggggtttcgtaattttgttcgattcggcgcgggatagtaggtgttagggattttggtgattttacgttcgaggtttttgtaaaagggggttgtttagtggtttagagacgtagtcggcggggtttttgtttagcgggggagttttaattgagaggttacgtaggtcggtaggaagtcgttttataggagggggtttaaggagaggggattttttttttttagatttcggtttcgttagagtagttttagggtatttttttagaaattgtttcgtacgtattggcgagttgggagcgttattacggtttttaaaaaattcgtatatattaagataataatgtgtcgttcgttcgtttcgcgtaagcggagtcgcgttcgttttttcgagtttcggtatatagattttaggtcgttttcgcgtttttcggggtttcgagaataatgttcgtttttttcgcgcgtaggagggagttggcggattacgcggggtcggggcgacggagcgggtttagttttacggttaggtcggggttttatttttcggttttgagagtttagtcggttcgggtcgcgtatttgttaggtcgggggatttacgtgcgtcgcgatacggcgggaggcgggtcgggttaggttcgttttttcggttttttcggaattagttttttaggtcgcggcgttcgtcggagcggagagggttggtgtttcggagttttcgagtcgggggttagagcggttaggttttcgagtcgggtcgagtcgaggttggcgacggttgcgttacgcgagggggcggggttgttacgggcggaggtcgtagtcggaagcggaagaggcgttcggagcggggagtggggtttagttgtagtcggagtttgggagacggtaagtgtgggttggggttcgcggcggcgatagcggcggcggcggtcgggggtgagtcggcggggtaggcgcgttggtgttattcggtttcggtttattttttttttttttttttttcggtttatatcgggtcgcgattttttatttttgattcgttgtttttgtttcggagggcggttattgtagattttgatttcgattttacggtgttgaaggcggagtttgaacggtttttggggtcgtttaagggtttagtttgggttttgtgtttgttcgcggaatggggtcggggttcgacgtagaagagttagagaagttttttagattttttttttatttttggttttaggtttagttcgtagatgattttttttttggcggtttggagtttgattttggtttagttcggttttttttttgttttcgggttttttttcggcgttattggtggcggttataggggatgggattttgagattttttgggatttggggcggtaggaagggacgcgaacgagggcgtaggtttttttgtgtgttttgttgtggtggtagagttattttagttcggaggatgggttaggttaagttgatagtttaaattttttggttgttttttcgtttcgttcgggagtttttagttttagtttcgggtgtgggtgttttgatgtggagttggggtggaaattgtttgaattaggtttttattagaggcggagttggcggttttttagtttttttttttgatgtttttgaaaaggaggagcgttttatcgttggtggtggaggtttgcgaggtggtaggtttgaggttgtagtggtagggtagtttagttaaaaataattatgggtgttggggtggttggaattcgggagggtagtcgttgatttggttggttgtatttttagttagtttagttttttggttaggaatagtaaatgagaagtcgataaggtttgtgtttaaagttgatatttttggtttggttttttttatattatttttttttttattgtgtagagtagagttttttaaagtataattgtggtttttagttgttttttaaataagttgtttgttgaggttttcgagaattagagataattgagaaatgggttttagagttttggttgggaggatgatatttgttatttttaatattttatttgtttagaatgtgttaaaggaaggatatttttttttgttattgttttgtgtgtggtattttataatttttatgtttgttattttttttgttaggttgagagatgttatttttattttttaggtatgttaattaaggtttagagtgatttgtttaaggttatgaggttggtatgtgatagtattaggatttagtttagttttttgttagagtttttgttttttagtttttttggaagggatttataaaatgtttgtaaggtatttaatatagttttgaagtgttatttggaatttttagatgtttatgaaaagttgttattagtatttttgtgggtataaagttgtgttaggtattttatttataggagagagatatttaatttttatagaattttgtaagagattattatttttttgttgtaagatgaagttgacggttagagtagtgtaataatttgtttaaaggtatatagttagaagtggtaagttatgatttagattgatatttatatgattttgaaattttgttttttattgatgtgaatatgtatggatataagaattttttaggttttaggaggtagtttttggcgtggtgtgattgtgattgtgttttttagttttggtgtttgtttgtttagtgaggatgggtaggattatatttgttttgtggtacgatatgtgttttggttaatagagtattttttgggttaattagtggggtgtgagtttttgtttttattttatagtttgggtatttgatttagagtaattgtaggaaaatagtgaaatattagttagttgattattaaaataataaatttaagtttttggggaggtgattttataaaatatttatttttaaagattttttaggtatacgggggaagataagttagtggggagatggagggtttttttagggatacggagaggtttttaggggtttggttatataggttttattgttttgtttaagtatggggagttgttttatgttgttttttttttgatagattttgttggtgagatggggtagttttagtgggtttgtataaaatgtgtttggttaggtaagtttaggattgattatgattggaggttggttgtggttaagtgtgagtgttgggaagaaggttggttttatggaggtagttagggattgacgtatgggtggagtaggttgttggttttatatggttagtttttttcgttggtggtagatttagtttggtaattttatttggtggatataagtttttattgaatagggatagtgaggtggggtttttttatttgttagatggttaattttttggttattttgggataggcggagggtaggatattagagttagagagttagaagaagggatagtaacggtattgttggataaaggtaaggtatttggtagggtattgtgggggtttaaaagggtgttaaatgggtttttggaaagaaagttagatgcgttgggtttacgtttttttgggttgatttttaggagggttatggaatgtttgtgaggtttgtgtgtttttttttttaagggttgtttttttagttttttgtggttttttatgtttatttgtggtttttatttttttgagtggggtttagtttagggttttagttagatagcgtttagttttttaaatttgagggttttgagttttcgttttttgtgtatagttttttgtttggtttttggttttatagagtatttattttacgggatcgttttttcgggcgggagggaatagagtgtaggaggttttttttttttttgtttttgatttttttgtggtagtgtttatcgtttttatttagggttattgttttagtttttggttttggtttatttagttttttgagtatttaggttattaggttagtgatgttttgttgggagttgtttgtttgtttattggtagagaaagttgttttttattgtttgttgtttgattagtgtgattttagagtttttttttattttataaatttttgggaggggtcgtttttaaatagaataatgggtttttttaggagtaatcgggaagttttagtagttttatggttggaggtggttggttgtgtgtttagtagggttttttgtttttcgtggtttagatgtattattgtaagcgatatcgtttttttgaattagattcgtatttgagttatcgatggaagaggaggaggttttatagtcgggaatatgaagggagattgcgatattcgtttcgaagggagttttttttacgaagatttcggtttagaaggtgagagggaattagataggagggaaagattttttttgttagttgggtttagttgtggtagttttagattttttgagatgattttatttttgtttagttgtttttggatttttgttttgttttttttgggtttttttattaattttatttgtatgttttggttttagtagtagttattatttttgtcgtttattttttttttgttttggagtgtttttttttttttttatatatttttttattttttaggttagtattttttcgtttaattttttaagttttttttggtgaggattaggaatataattttatttttggaaagtttgttttttgggtttattttagtttttaggttaaatttagagttgtagtaggttatagggaattttggaagggtatagaatttttggaggtattttattatatttttttttttttgtatttttttttttatagttggaggatgttgtcgttggatagggttttggagggcgggtttagtatttttgtatttttttttttttgtttattttttattagtgtggatgtttttagtataggttgtttttttttagttttttatagtggttttattataggttttttgtttgttaatagtaaggatttagttgattagcgtttttattttttttttggtagttatgatcgtttgttttattagaggaggtatcgggagcgtcgtgatagcgatatatatcggtgtgaagagcggagtttattttttggagaggattattatggatttttacgttttcgttatcgtcggcgatcgcgggagagggggttatatcggattcgtaagtatgtttattattgttataaacgtcgtattaggttttgtagtagcgttttttcggtgagtggtagttagagtgtgttggttggggtttaaaggttttatttttttttagtttttttttaggttggttggttcgggtgagtattgttagttttgtgtacgtgtattggtgtgcgtgtatgtgtgtgtgtatgtgttgtttggtttaggtgtagggttgattatagggttttggtttttgtgttttttggttttttttagtggtaattgtaggaattttggtttcgatgttggttggtttttggtttgtttatgtttatatagtgttttagataaaggttacgtggtgtaagtggttggggatattttttaggatattttttagggattttagtagagtggttggtatggtggtttgtagttatatggtttggttttttttatttagagattgttttttcgtgtaattgagtgttttgatgtggattgtatttatttttgcgttttatttgtatatttttttttaaaggtttttagtttggagtgttttataggatcggaggatttgtttgttagttagtttagattgggaattttttttttgatttttagttaggttttttttagtcgagtttttttacgaggggtagtcgcggtgaggaggggtaggtgtttgtgtgatggggtatgtgaagaaatggtagaaaggttgtcgttttaggtttcgtttagttgtaggttatatgtttagagtagggtttggttagtatttttagtatggagggttgtaaggtttttggagtttatattgcgtttagttttttggggaagtaaagttagttgtgtattttcgaggttacgtgcggttttttttttttttttattttttttttttgttttttttttgtcggttttgaggtttttgaggagtagtggagaggttaggtgttttttttgtttagcgttttttgtgatttttttgagtggttataggttgagggttgattgtgcgggcgattgtagcgtggtttttttatttttttgtatattgttatatgttgttataggatggtagtgtaggtttggttttgtttttttgtttggtgttttttatcgatcgtcgtgaggtttgggatgggtttagattgtgagtagtatgggtgttaaggttagggtaggagttggtatggggtttgtgtgggttattgtggtaggaagtttggtagtcgattggtttagaggattttaggttgtttttttttttgaggttggtggtaggagggttgttgacggaaggttgtttttggtagtgatggtgaaatttggttaaggatgtcgtttggaggtaggtagtagtttggttgtgagtggtagttgttaggtatgtgtaagtttgcgtgggcgaatagaggtaggtaaggataggttgggtattttgtagttgaagtcggagtagtcgttgattagtttggatggttggatttaggcggggttagttgtttttttgcgtcgtcgtttttattgtatttttcgttttggtttaaagttatatgggagggtttgggagggagagattcggaggaggaggaggagggagt

SEQ ID NO: 13 - DNA, 7222 bp, homo sapiens
gttatggtggagttggtagagatttaggggatattaaatatttttataaattatgttttgaaattttttgttttagggagagttgttggtgaaggatttgatgtgtagttgtagtttggaagtggggggtttttttgtgatatttttttgttttaggggtgggtttagatttgtggggaggggtatgggtggggttgtggttggttggtggttgttggggtggtgttggggaaatttttggtgtttttgtggagtggttttaaggagggggtggtgtttggagggatggtttgttttgattgtgggtttttagtttttgtgtggtgtggggataattaggtgttatgttttgttgttttattgtgtgatgtttgtgaggttggggatgttatttttagattgggtgggatgtgtatgtttatagtgaggttttaaaagatttttattttagtttttttatttggaaagtggggttttgtaattttgtttgatttggtgtgggatagtaggtgttagggattttggtgattttatgtttgaggtttttgtaaaagggggttgtttagtggtttagagatgtagttggtggggtttttgtttagtgggggagttttaattgagaggttatgtaggttggtaggaagttgttttataggagggggtttaaggagaggggattttttttttttagattttggttttgttagagtagttttagggtatttttttagaaattgttttgtatgtattggtgagttgggagtgttattatggtttttaaaaaatttgtatatattaagataataatgtgttgtttgtttgttttgtgtaagtggagttgtgtttgtttttttgagttttggtatatagattttaggttgtttttgtgttttttggggttttgagaataatgtttgttttttttgtgtgtaggagggagttggtggattatgtggggttggggtgatggagtgggtttagttttatggttaggttggggttttattttttggttttgagagtttagttggtttgggttgtgtatttgttaggttgggggatttatgtgtgttgtgatatggtgggaggtgggttgggttaggtttgtttttttggtttttttggaattagttttttaggttgtggtgtttgttggagtggagagggttggtgttttggagtttttgagttgggggttagagtggttaggtttttgagttgggttgagttgaggttggtgatggttgtgttatgtgagggggtggggttgttatgggtggaggttgtagttggaagtggaagaggtgtttggagtggggagtggggtttagttgtagttggagtttgggagatggtaagtgtgggttggggtttgtggtggtgatagtggtggtggtggttgggggtgagttggtggggtaggtgtgttggtgttatttggttttggtttatttttttttttttttttttttggtttatattgggttgtgattttttatttttgatttgttgtttttgttttggagggtggttattgtagattttgattttgattttatggtgttgaaggtggagtttgaatggtttttggggttgtttaagggtttagtttgggttttgtgtttgtttgtggaatggggttggggtttgatgtagaagagttagagaagttttttagattttttttttatttttggttttaggtttagtttgtagatgattttttttttggtggtttggagtttgattttggtttagtttggttttttttttgtttttgggtttttttttggtgttattggtggtggttataggggatgggattttgagattttttgggatttggggtggtaggaagggatgtgaatgagggtgtaggtttttttgtgtgttttgttgtggtggtagagttattttagtttggaggatgggttaggttaagttgatagtttaaattttttggttgtttttttgttttgtttgggagtttttagttttagttttgggtgtgggtgttttgatgtggagttggggtggaaattgtttgaattaggtttttattagaggtggagttggtggttttttagtttttttttttgatgtttttgaaaaggaggagtgttttattgttggtggtggaggtttgtgaggtggtaggtttgaggttgtagtggtagggtagtttagttaaaaataattatgggtgttggggtggttggaatttgggagggtagttgttgatttggttggttgtatttttagttagtttagttttttggttaggaatagtaaatgagaagttgataaggtttgtgtttaaagttgatatttttggtttggttttttttatattatttttttttttattgtgtagagtagagttttttaaagtataattgtggtttttagttgttttttaaataagttgtttgttgaggtttttgagaattagagataattgagaaatgggttttagagttttggttgggaggatgatatttgttatttttaatattttatttgtttagaatgtgttaaaggaaggatatttttttttgttattgttttgtgtgtggtattttataatttttatgtttgttattttttttgttaggttgagagatgttatttttattttttaggtatgttaattaaggtttagagtgatttgtttaaggttatgaggttggtatgtgatagtattaggatttagtttagttttttgttagagtttttgttttttagtttttttggaagggatttataaaatgtttgtaaggtatttaatatagttttgaagtgttatttggaatttttagatgtttatgaaaagttgttattagtatttttgtgggtataaagttgtgttaggtattttatttataggagagagatatttaatttttatagaattttgtaagagattattatttttttgttgtaagatgaagttgatggttagagtagtgtaataatttgtttaaaggtatatagttagaagtggtaagttatgatttagattgatatttatatgattttgaaattttgttttttattgatgtgaatatgtatggatataagaattttttaggttttaggaggtagtttttggtgtggtgtgattgtgattgtgttttttagttttggtgtttgtttgtttagtgaggatgggtaggattatatttgttttgtggtatgatatgtgttttggttaatagagtattttttgggttaattagtggggtgtgagtttttgtttttattttatagtttgggtatttgatttagagtaattgtaggaaaatagtgaaatattagttagttgattattaaaataataaatttaagtttttggggaggtgattttataaaatatttatttttaaagattttttaggtatatgggggaagataagttagtggggagatggagggtttttttagggatatggagaggtttttaggggtttggttatataggttttattgttttgtttaagtatggggagttgttttatgttgttttttttttgatagattttgttggtgagatggggtagttttagtgggtttgtataaaatgtgtttggttaggtaagtttaggattgattatgattggaggttggttgtggttaagtgtgagtgttgggaagaaggttggttttatggaggtagttagggattgatgtatgggtggagtaggttgttggttttatatggttagttttttttgttggtggtagatttagtttggtaattttatttggtggatataagtttttattgaatagggatagtgaggtggggtttttttatttgttagatggttaattttttggttattttgggataggtggagggtaggatattagagttagagagttagaagaagggatagtaatggtattgttggataaaggtaaggtatttggtagggtattgtgggggtttaaaagggtgttaaatgggtttttggaaagaaagttagatgtgttgggtttatgtttttttgggttgatttttaggagggttatggaatgtttgtgaggtttgtgtgtttttttttttaagggttgtttttttagttttttgtggttttttatgtttatttgtggtttttatttttttgagtggggtttagtttagggttttagttagatagtgtttagttttttaaatttgagggttttgagtttttgttttttgtgtatagttttttgtttggtttttggttttatagagtatttattttatgggattgtttttttgggtgggagggaatagagtgtaggaggttttttttttttttgtttttgatttttttgtggtagtgtttattgtttttatttagggttattgttttagtttttggttttggtttatttagttttttgagtatttaggttattaggttagtgatgttttgttgggagttgtttgtttgtttattggtagagaaagttgttttttattgtttgttgtttgattagtgtgattttagagtttttttttattttataaatttttgggaggggttgtttttaaatagaataatgggtttttttaggagtaattgggaagttttagtagttttatggttggaggtggttggttgtgtgtttagtagggttttttgttttttgtggtttagatgtattattgtaagtgatattgtttttttgaattagatttgtatttgagttattgatggaagaggaggaggttttatagttgggaatatgaagggagattgtgatatttgttttgaagggagttttttttatgaagattttggtttagaaggtgagagggaattagataggagggaaagattttttttgttagttgggtttagttgtggtagttttagattttttgagatgattttatttttgtttagttgtttttggatttttgttttgttttttttgggtttttttattaattttatttgtatgttttggttttagtagtagttattatttttgttgtttattttttttttgttttggagtgtttttttttttttttatatatttttttattttttaggttagtatttttttgtttaattttttaagttttttttggtgaggattaggaatataattttatttttggaaagtttgttttttgggtttattttagtttttaggttaaatttagagttgtagtaggttatagggaattttggaagggtatagaatttttggaggtattttattatatttttttttttttgtatttttttttttatagttggaggatgttgttgttggatagggttttggagggtgggtttagtatttttgtatttttttttttttgtttattttttattagtgtggatgtttttagtataggttgtttttttttagttttttatagtggttttattataggttttttgtttgttaatagtaaggatttagttgattagtgtttttattttttttttggtagttatgattgtttgttttattagaggaggtattgggagtgttgtgatagtgatatatattggtgtgaagagtggagtttattttttggagaggattattatggatttttatgtttttgttattgttggtgattgtgggagagggggttatattggatttgtaagtatgtttattattgttataaatgttgtattaggttttgtagtagtgtttttttggtgagtggtagttagagtgtgttggttggggtttaaaggttttatttttttttagtttttttttaggttggttggtttgggtgagtattgttagttttgtgtatgtgtattggtgtgtgtgtatgtgtgtgtgtatgtgttgtttggtttaggtgtagggttgattatagggttttggtttttgtgttttttggttttttttagtggtaattgtaggaattttggttttgatgttggttggtttttggtttgtttatgtttatatagtgttttagataaaggttatgtggtgtaagtggttggggatattttttaggatattttttagggattttagtagagtggttggtatggtggtttgtagttatatggtttggttttttttatttagagattgtttttttgtgtaattgagtgttttgatgtggattgtatttatttttgtgttttatttgtatatttttttttaaaggtttttagtttggagtgttttataggattggaggatttgtttgttagttagtttagattgggaattttttttttgatttttagttaggttttttttagttgagtttttttatgaggggtagttgtggtgaggaggggtaggtgtttgtgtgatggggtatgtgaagaaatggtagaaaggttgttgttttaggttttgtttagttgtaggttatatgtttagagtagggtttggttagtatttttagtatggagggttgtaaggtttttggagtttatattgtgtttagttttttggggaagtaaagttagttgtgtatttttgaggttatgtgtggttttttttttttttttattttttttttttgttttttttttgttggttttgaggtttttgaggagtagtggagaggttaggtgttttttttgtttagtgttttttgtgatttttttgagtggttataggttgagggttgattgtgtgggtgattgtagtgtggtttttttatttttttgtatattgttatatgttgttataggatggtagtgtaggtttggttttgtttttttgtttggtgttttttattgattgttgtgaggtttgggatgggtttagattgtgagtagtatgggtgttaaggttagggtaggagttggtatggggtttgtgtgggttattgtggtaggaagtttggtagttgattggtttagaggattttaggttgtttttttttttgaggttggtggtaggagggttgttgatggaaggttgtttttggtagtgatggtgaaatttggttaaggatgttgtttggaggtaggtagtagtttggttgtgagtggtagttgttaggtatgtgtaagtttgtgtgggtgaatagaggtaggtaaggataggttgggtattttgtagttgaagttggagtagttgttgattagtttggatggttggatttaggtggggttagttgtttttttgtgttgttgtttttattgtattttttgttttggtttaaagttatatgggagggtttgggagggagagatttggaggaggaggaggagggagt

SEQ ID NO: 14 - DNA, 7222 bp, homo sapiens
atttttttttttttttttttcgagttttttttttttagatttttttatgtggttttgggttagagcggaagatgtagtgagaacggcggcgtaagaaggtagttggtttcgtttgggtttaattatttagattggttagcggttgtttcggttttagttgtagaatgtttagtttgtttttgtttgtttttgttcgtttacgtagatttgtatatgtttgatagttgttatttatagttaagttgttatttgtttttagacggtatttttggttagattttattattattattagaaatagtttttcgttagtagtttttttgttattagttttaagaaggaaagtagtttgggattttttgggttagtcgattgttaggttttttattataatggtttatataggttttatgttagtttttgttttggttttggtatttatgttgtttataatttaggtttattttaagttttacgacgatcgatagagggtattaaatagagaaatagagttagatttgtattgttattttgtggtagtatgtggtagtgtgtaaagaggtgaaagggttacgttgtaatcgttcgtatagttaatttttaatttgtagttatttaaagaagttatagaaagcgttgggtagagaagatatttggtttttttattgttttttaggggttttaaggtcggtaggagggaggtagggaagagggatgggggagaagagaagatcgtacgtaatttcggaaatatataattggttttgtttttttaggggattgagcgtaatgtgggttttagagattttataattttttatgttaggaatattggttaggttttgttttgggtatgtggtttgtaattggacgaggtttggggcggtagtttttttgttatttttttatatgttttattatataggtatttgtttttttttatcgcgattgtttttcgtaaagaggttcggttggagagggtttggttggagattagaagggaagtttttagtttgagttggttgataggtaaatttttcggttttgtgaggtattttagattgggggtttttgggaaggggtgtgtagatgagacgtagaggtgggtgtagtttatattagagtatttagttatacgaggaggtagtttttgggtgggaaggattaggttatatagttgtagattattatattagttattttattaggatttttaagaagtgttttaagaagtgtttttagttatttgtattacgtggtttttgtttggagtattgtgtagatatagataggttaggggttagttagtatcggagttagagtttttatagttgttattggaaagagttagaagatatagaggttaggattttgtgattagttttatatttggattagataatatatatatatatatatgtacgtatattagtgtacgtgtatagggttggtagtatttattcggattagttagtttgagagaaggttaggaagagatgaggtttttaagttttagttagtatattttggttattatttatcgaggaggcgttgttataagatttggtgcggcgtttgtggtagtggtgggtatgtttgcgggttcggtatggttttttttttcgcgatcgtcgacgatgacgagaacgtgaaggtttatagtagttttttttaaaggatgggtttcgttttttatatcggtatgtatcgttgttacggcgttttcggtattttttttggtagggtaggcggttatggttgttaaaagggggatggggacgttggttagttgggtttttgttgttagtaagtaagagatttgtggtaaggttattgtaaagggttaaagggggatagtttgtgttaaaagtatttatattggtgggaagtgggtagagaggggagggtgtaaaggtattaagttcgttttttagagttttgtttaacgatagtattttttagttgtaggaggaggggtataggggaaggggagtatggtagagtgtttttaagggttttatatttttttagagttttttgtggtttgttgtaattttaagtttgatttgggagttaagataggtttagggagtaaattttttaggggtgaggttatgtttttaatttttattaaggaaggtttaggaggttaagcggaaagatgttggtttagaaaatgggggaatgtgtggggagaagaaaaggtattttaagatagagaaagagtgggcggtaaggatggtagttattgttgaggttaaggtatgtaggtgaggttagtggaggagtttaaagaggatagggtagggatttagggatagttgggtagggatggagttattttaaggagtttggagttgttatagttgagtttagttgatagaaggagttttttttttttatttagtttttttttattttttggatcgagattttcgtgggggaggtttttttcgggacgggtatcgtagtttttttttatgttttcgattgtaggattttttttttttttatcggtagtttaggtacgggtttggtttaggggagcggtatcgtttatagtgatgtatttaggttacgaggaatagagagttttgttaaatatatagttagttatttttagttatggggttgttggggtttttcggttgtttttgaagaggtttattgttttgtttgaaggcggttttttttagaggtttatgaagtgaagaagaattttgaggttatattggttaaatagtagataataggaaataattttttttgttagtgaataaataaatagtttttagtagagtattattagtttggtggtttgggtgtttagggaattgggtgagttagggttaggggttgaggtagtaattttgggtggggacggtgaatattattatagggagattaaaggtaggagaaaggggagttttttgtattttattttttttcgttcgggggggcggtttcgtgaagtgaatgttttgtaaagttaaaggttaggtaaagggttgtatataggaggcgagggtttaaagtttttaagtttgagaagttgaacgttgtttggttagggttttgaattggattttatttaagggagtaaggattataagtgagtatgaggagttataagagattagaagagtagtttttggagaaagaggtatataggttttataaatattttatagtttttttgagggttaatttaaggggacgtggatttagcgtatttaattttttttttagaggtttatttagtatttttttagatttttatagtgttttgttaggtgttttgtttttatttaatagtatcgttattgtttttttttttagttttttggttttagtattttatttttcgtttattttaggatagttagagggttagttatttggtaggtaaaagagttttattttattatttttgtttagtgaggatttatatttattaaatgaaattgttaggttggatttgttattagcggagaaagttggttatgtgaggttagtaatttgttttatttatacgttaatttttgattgtttttatggagttagttttttttttaatatttatatttggttatagttaatttttagttatggttagttttgagtttgtttggttaagtatattttgtataaatttattgaggttgttttattttattagtagggtttgttaggagaaaagtagtatagaatagttttttatgtttgagtaggatagtgaggtttatgtgattaaatttttgggagttttttcgtgtttttaagaaagttttttatttttttattaatttgttttttttcgtgtatttgggaagtttttggagataaatattttgtgaaattatttttttaaaagtttagatttgttgttttggtaattagttgattaatattttattgtttttttgtaattattttgggttaggtgtttaagttatggaatgaaagtaggaatttatattttattaattgatttagaagatgttttattggttagggtatatgtcgtgttataaggtaagtatggttttgtttatttttattgggtagataaatattagagttggaggatatagttatagttatattacgttaaagattattttttgggatttagaagatttttatgtttatatatatttatattaatggaaaataaaattttagagttatatagatgttaatttgaattatggtttgttatttttagttgtgtgtttttgaataaattattatattattttgatcgttagttttattttgtaataagggaatagtaattttttataaggttttgtgaggattaaatattttttttttataagtgaaatgtttagtatagttttgtgtttatagaggtattagtggtagttttttatgaatatttgaaagttttaggtaatattttagggttgtgttaaatgttttatagatattttataagttttttttaaggaaattgggaggtaagagttttggtagaaaattaaattaaattttagtgttgttatatattagttttatgattttagataagttattttaggttttggttagtatgtttggaaaatggagataatattttttagtttggtaaaagagatgataagtatgagagttataaggtattatatataaagtaataatagagaagagtattttttttttaatatattttaggtaagtaaaatattggaaatagtagatattatttttttagttagggttttagggtttattttttaattatttttgattttcgaaaattttagtaaatagtttgtttaaaaagtagttaaaggttataattatgttttgggaagttttgttttgtataatgaggaaaaaggtgatatgaagaaaattaagttaaggatgttaattttgagtataggttttgtcggttttttatttgttgtttttggttagagaattgggttgattagaagtgtagttagttaggttagcggttgttttttcggattttagttattttagtatttatggttatttttggttggattgttttattattgtaattttaaatttgttatttcgtaagtttttattattaacggtgaaacgttttttttttttaagggtattaagaagggaagttggaaggtcgttaatttcgtttttgatgggggtttggtttaggtaatttttattttagttttatattagggtatttatattcggaattaaagttagagattttcgggcgggacggaggagtagttaggggatttgaattgttagtttggtttagtttatttttcgggttggagtggttttattattataataaaatatataggggagtttgcgttttcgttcgcgtttttttttgtcgttttaggttttagggggttttagagttttattttttgtaatcgttattagtggcgtcgaggggagattcggggatagagggaaagtcggattgggttagaattaaattttaggtcgttaagggaggagttatttgcggattaagtttgaagttaggggtaggggaggggtttgaagggtttttttggtttttttacgtcggatttcgattttatttcgcgggtaggtatagagtttaaattggatttttgagcggttttagaggtcgtttaggtttcgtttttaatatcgtggggtcgaggttagggtttgtagtgatcgtttttcggggtagaagtagcgggttaggggtgagaggtcgcggttcgatatgggtcgaagaggagaaagaaagggagtaggtcgagatcgaatggtattagcgcgtttgtttcgtcgatttattttcggtcgtcgtcgtcgttgtcgtcgtcgcggattttagtttatatttatcgttttttaggtttcggttgtagttaggttttatttttcgtttcgagcgtttttttcgttttcggttgcgattttcgttcgtggtagtttcgttttttcgcgtgacgtagtcgtcgttagtttcggttcgattcggttcggaggtttggtcgttttagttttcgattcgaaggtttcggggtattagtttttttcgtttcggcgggcgtcgcggtttaggagattagtttcgggagggtcgaggggacgagtttggttcggttcgtttttcgtcgtgtcgcggcgtacgtaggtttttcgatttgataggtgcgcggttcgggtcggttgggtttttagagtcgagaggtggggtttcgatttggtcgtggggttgggttcgtttcgtcgtttcgatttcgcgtggttcgttaatttttttttgcgcgcggagaggacgggtattgttttcggggtttcggagagcgcgagagcggtttgaggtttgtgtgtcggagttcgggaaggcggacgcgatttcgtttgcgcgaaacgagcgaacgatatattattattttggtgtgtgcgggttttttgaaagtcgtggtggcgtttttagttcgttagtgcgtgcggggtagtttttgggaagatattttagagttattttggcggggtcggagtttggagggaggagattttttttttttgagtttttttttgtggagcggttttttgtcggtttgcgtggttttttagttaagattttttcgttagataaaagtttcgtcggttgcgtttttgggttattggatagtttttttttgtagaggtttcgagcgtggggttattaaaatttttgatatttattgtttcgcgtcgggtcggataggattacgaggttttattttttagatgagaaaattgaggtggggattttttgagattttattgtgagcgtgcgcgtttcgttcggtttgggagtggcgttttcggtttcgcgagcgtcgcgtagtgaagcgatagggcgtggcgtttaattgtttttacgttacgcgagggttagaaattcgtagtcggggcggattatttttttaggtatcgttttttttttgggatcgtttcgcgggggcgttaagggtttttttagtatcgtttcggcggtcgttagttagtcgcggtttcgtttatgttttttttcgcgggtttgggttcgtttttgaagcggggaggtgtcgtaggggagtttttcgttttcgagttgcggttgcgtattaagtttttcgttagcggttttttttgaaacggggggttttaaggcgtgatttgtaggggtgtttagtattttttaaatttttgttagttttattatggt

SEQ ID NO: 15 - DNA, 7222 bp, homo sapiens
attttttttttttttttttttgagttttttttttttagatttttttatgtggttttgggttagagtggaagatgtagtgagaatggtggtgtaagaaggtagttggttttgtttgggtttaattatttagattggttagtggttgttttggttttagttgtagaatgtttagtttgtttttgtttgtttttgtttgtttatgtagatttgtatatgtttgatagttgttatttatagttaagttgttatttgtttttagatggtatttttggttagattttattattattattagaaatagttttttgttagtagtttttttgttattagttttaagaaggaaagtagtttgggattttttgggttagttgattgttaggttttttattataatggtttatataggttttatgttagtttttgttttggttttggtatttatgttgtttataatttaggtttattttaagttttatgatgattgatagagggtattaaatagagaaatagagttagatttgtattgttattttgtggtagtatgtggtagtgtgtaaagaggtgaaagggttatgttgtaattgtttgtatagttaatttttaatttgtagttatttaaagaagttatagaaagtgttgggtagagaagatatttggtttttttattgttttttaggggttttaaggttggtaggagggaggtagggaagagggatgggggagaagagaagattgtatgtaattttggaaatatataattggttttgtttttttaggggattgagtgtaatgtgggttttagagattttataattttttatgttaggaatattggttaggttttgttttgggtatgtggtttgtaattggatgaggtttggggtggtagtttttttgttatttttttatatgttttattatataggtatttgtttttttttattgtgattgttttttgtaaagaggtttggttggagagggtttggttggagattagaagggaagtttttagtttgagttggttgataggtaaattttttggttttgtgaggtattttagattgggggtttttgggaaggggtgtgtagatgagatgtagaggtgggtgtagtttatattagagtatttagttatatgaggaggtagtttttgggtgggaaggattaggttatatagttgtagattattatattagttattttattaggatttttaagaagtgttttaagaagtgtttttagttatttgtattatgtggtttttgtttggagtattgtgtagatatagataggttaggggttagttagtattggagttagagtttttatagttgttattggaaagagttagaagatatagaggttaggattttgtgattagttttatatttggattagataatatatatatatatatatgtatgtatattagtgtatgtgtatagggttggtagtatttatttggattagttagtttgagagaaggttaggaagagatgaggtttttaagttttagttagtatattttggttattatttattgaggaggtgttgttataagatttggtgtggtgtttgtggtagtggtgggtatgtttgtgggtttggtatggtttttttttttgtgattgttgatgatgatgagaatgtgaaggtttatagtagttttttttaaaggatgggttttgttttttatattggtatgtattgttgttatggtgtttttggtattttttttggtagggtaggtggttatggttgttaaaagggggatggggatgttggttagttgggtttttgttgttagtaagtaagagatttgtggtaaggttattgtaaagggttaaagggggatagtttgtgttaaaagtatttatattggtgggaagtgggtagagaggggagggtgtaaaggtattaagtttgttttttagagttttgtttaatgatagtattttttagttgtaggaggaggggtataggggaaggggagtatggtagagtgtttttaagggttttatatttttttagagttttttgtggtttgttgtaattttaagtttgatttgggagttaagataggtttagggagtaaattttttaggggtgaggttatgtttttaatttttattaaggaaggtttaggaggttaagtggaaagatgttggtttagaaaatgggggaatgtgtggggagaagaaaaggtattttaagatagagaaagagtgggtggtaaggatggtagttattgttgaggttaaggtatgtaggtgaggttagtggaggagtttaaagaggatagggtagggatttagggatagttgggtagggatggagttattttaaggagtttggagttgttatagttgagtttagttgatagaaggagttttttttttttatttagtttttttttattttttggattgagatttttgtgggggaggttttttttgggatgggtattgtagtttttttttatgtttttgattgtaggattttttttttttttattggtagtttaggtatgggtttggtttaggggagtggtattgtttatagtgatgtatttaggttatgaggaatagagagttttgttaaatatatagttagttatttttagttatggggttgttggggttttttggttgtttttgaagaggtttattgttttgtttgaaggtggttttttttagaggtttatgaagtgaagaagaattttgaggttatattggttaaatagtagataataggaaataattttttttgttagtgaataaataaatagtttttagtagagtattattagtttggtggtttgggtgtttagggaattgggtgagttagggttaggggttgaggtagtaattttgggtggggatggtgaatattattatagggagattaaaggtaggagaaaggggagttttttgtattttatttttttttgtttgggggggtggttttgtgaagtgaatgttttgtaaagttaaaggttaggtaaagggttgtatataggaggtgagggtttaaagtttttaagtttgagaagttgaatgttgtttggttagggttttgaattggattttatttaagggagtaaggattataagtgagtatgaggagttataagagattagaagagtagtttttggagaaagaggtatataggttttataaatattttatagtttttttgagggttaatttaaggggatgtggatttagtgtatttaattttttttttagaggtttatttagtatttttttagatttttatagtgttttgttaggtgttttgtttttatttaatagtattgttattgtttttttttttagttttttggttttagtattttattttttgtttattttaggatagttagagggttagttatttggtaggtaaaagagttttattttattatttttgtttagtgaggatttatatttattaaatgaaattgttaggttggatttgttattagtggagaaagttggttatgtgaggttagtaatttgttttatttatatgttaatttttgattgtttttatggagttagttttttttttaatatttatatttggttatagttaatttttagttatggttagttttgagtttgtttggttaagtatattttgtataaatttattgaggttgttttattttattagtagggtttgttaggagaaaagtagtatagaatagttttttatgtttgagtaggatagtgaggtttatgtgattaaatttttgggagtttttttgtgtttttaagaaagttttttatttttttattaatttgtttttttttgtgtatttgggaagtttttggagataaatattttgtgaaattatttttttaaaagtttagatttgttgttttggtaattagttgattaatattttattgtttttttgtaattattttgggttaggtgtttaagttatggaatgaaagtaggaatttatattttattaattgatttagaagatgttttattggttagggtatatgttgtgttataaggtaagtatggttttgtttatttttattgggtagataaatattagagttggaggatatagttatagttatattatgttaaagattattttttgggatttagaagatttttatgtttatatatatttatattaatggaaaataaaattttagagttatatagatgttaatttgaattatggtttgttatttttagttgtgtgtttttgaataaattattatattattttgattgttagttttattttgtaataagggaatagtaattttttataaggttttgtgaggattaaatattttttttttataagtgaaatgtttagtatagttttgtgtttatagaggtattagtggtagttttttatgaatatttgaaagttttaggtaatattttagggttgtgttaaatgttttatagatattttataagttttttttaaggaaattgggaggtaagagttttggtagaaaattaaattaaattttagtgttgttatatattagttttatgattttagataagttattttaggttttggttagtatgtttggaaaatggagataatattttttagtttggtaaaagagatgataagtatgagagttataaggtattatatataaagtaataatagagaagagtattttttttttaatatattttaggtaagtaaaatattggaaatagtagatattatttttttagttagggttttagggtttattttttaattatttttgatttttgaaaattttagtaaatagtttgtttaaaaagtagttaaaggttataattatgttttgggaagttttgttttgtataatgaggaaaaaggtgatatgaagaaaattaagttaaggatgttaattttgagtataggttttgttggttttttatttgttgtttttggttagagaattgggttgattagaagtgtagttagttaggttagtggttgtttttttggattttagttattttagtatttatggttatttttggttggattgttttattattgtaattttaaatttgttattttgtaagtttttattattaatggtgaaatgttttttttttttaagggtattaagaagggaagttggaaggttgttaattttgtttttgatgggggtttggtttaggtaatttttattttagttttatattagggtatttatatttggaattaaagttagagatttttgggtgggatggaggagtagttaggggatttgaattgttagtttggtttagtttattttttgggttggagtggttttattattataataaaatatataggggagtttgtgtttttgtttgtgtttttttttgttgttttaggttttagggggttttagagttttattttttgtaattgttattagtggtgttgaggggagatttggggatagagggaaagttggattgggttagaattaaattttaggttgttaagggaggagttatttgtggattaagtttgaagttaggggtaggggaggggtttgaagggtttttttggtttttttatgttggattttgattttattttgtgggtaggtatagagtttaaattggatttttgagtggttttagaggttgtttaggttttgtttttaatattgtggggttgaggttagggtttgtagtgattgttttttggggtagaagtagtgggttaggggtgagaggttgtggtttgatatgggttgaagaggagaaagaaagggagtaggttgagattgaatggtattagtgtgtttgttttgttgatttatttttggttgttgttgttgttgttgttgttgtggattttagtttatatttattgttttttaggttttggttgtagttaggttttattttttgttttgagtgttttttttgtttttggttgtgatttttgtttgtggtagttttgtttttttgtgtgatgtagttgttgttagttttggtttgatttggtttggaggtttggttgttttagtttttgatttgaaggttttggggtattagttttttttgttttggtgggtgttgtggtttaggagattagttttgggagggttgaggggatgagtttggtttggtttgttttttgttgtgttgtggtgtatgtaggttttttgatttgataggtgtgtggtttgggttggttgggtttttagagttgagaggtggggttttgatttggttgtggggttgggtttgttttgttgttttgattttgtgtggtttgttaatttttttttgtgtgtggagaggatgggtattgtttttggggttttggagagtgtgagagtggtttgaggtttgtgtgttggagtttgggaaggtggatgtgattttgtttgtgtgaaatgagtgaatgatatattattattttggtgtgtgtgggttttttgaaagttgtggtggtgtttttagtttgttagtgtgtgtggggtagtttttgggaagatattttagagttattttggtggggttggagtttggagggaggagattttttttttttgagtttttttttgtggagtggttttttgttggtttgtgtggttttttagttaagatttttttgttagataaaagttttgttggttgtgtttttgggttattggatagtttttttttgtagaggttttgagtgtggggttattaaaatttttgatatttattgttttgtgttgggttggataggattatgaggttttattttttagatgagaaaattgaggtggggattttttgagattttattgtgagtgtgtgtgttttgtttggtttgggagtggtgtttttggttttgtgagtgttgtgtagtgaagtgatagggtgtggtgtttaattgtttttatgttatgtgagggttagaaatttgtagttggggtggattatttttttaggtattgttttttttttgggattgttttgtgggggtgttaagggtttttttagtattgttttggtggttgttagttagttgtggttttgtttatgtttttttttgtgggtttgggtttgtttttgaagtggggaggtgttgtaggggagttttttgtttttgagttgtggttgtgtattaagttttttgttagtggttttttttgaaatggggggttttaaggtgtgatttgtaggggtgtttagtattttttaaatttttgttagttttattatggt

SEQ ID NO: 16 - DNA, 50 bp, homo sapiens
cgccccctgggaccagatcccctaggtctgaaaaccctgggcctcccagg

SEQ ID NO: 17 - DNA, 50 bp, homo sapiens
cgttttttgggattagattttttaggtttgaaaattttgggttttttagg

SEQ ID NO: 18 - DNA, 50 bp, homo sapiens
tgttttttgggattagattttttaggtttgaaaattttgggttttttagg

SEQ ID NO: 19 - DNA, 50 bp, homo sapiens
tttgggaggtttagggtttttagatttaggggatttggttttagggggcg

SEQ ID NO: 20 - DNA, 50 bp, homo sapiens
tttgggaggtttagggtttttagatttaggggatttggttttagggggtg

SEQ ID NO: 21 - DNA, 3001 bp, homo sapiens
tgtgatagagctttgaacaaatgctgcagccattgtaatcaccaaacactatagtaagtgctgggaatgaataaaaacacaatcaccgtcctacaggagttcagtatttaattaaaaaatttacagcatctgctagattgcaggctgttctagaccctggagttcaagtagtgcaaagttcctgtcttcctggaacttaccaacagtactggagtttcaacgttctataaacaaagatgggtgaggacattagccccgggctaattaaagcgctcaggcccgctccagacctgagaatatcagctgaatctgaatcaactgttctccatttctgtcggttggtggtatcgcggggccacggcgacctccagcggccaccctccgtcttgtggtctgttctgggtccccgggaaggaaagggaggggcgataagccgggtccttgggagcgtcctggtctcccttcgctttacagactaggaggccgcagctagctggcagtctcagatccaggtttcccatctctgggatgagaggagagttcttcactcaggactgccagcgcaatgcaggtcgtgaagaactgcagggtcgtttatcgatacaaagtgagtgttggaggaacccatcaagacacaggaagggggaaatcctagcgccgccagtcggagatgaccaagactgaacctcaggcccagccctcccttctctcttagcctgcaggtttttctcctattctggcgttgggaccggatgacagctgcgaaaccaaaacgggaatggataaactgaggtgccactggggacctgtttcagaagtacctcctgggcggggccatcaccggaagtggctttaggcatgtaacctacaatgcccgcctctaattgcgctaccagtaggcgacgagccgcctccacttccggtccccagagcagtggccagcagccccctctttactgctctcctattggctgccgcaaggacgcgctgtgatttcccattggtcgcgtctcccctccggcgccgcgcctccttcctccaggtatagtctcgtctttaggcatccgattggctaaaggctgggagggcgtttgcccgactcgaccaatgagtggggtcgagagtgagggcggtggctgcgtgatgggggcagggcgggacttggcgtggccattggccagggcgggtacaggctagagatatgattggttcaggagaggggcactgtggtggggtcgggactgcgcggcctcagcagctgcgggagacggaagtggcaagagcgcggcctcagagggtcgggcggacgccgcctgggtgagtcaccgtgccccctgcactgcaagcctgggaaccgcaacgaccgcgtcttgcccggctccgccctggcccccaccggctttcctgagtcccgccttctgtcatttggggctccgcctcccagtctttaggctccgcccctagaacctgggcacctgggctcccctgccaacctggcccgccccctgggaccagatcccctaggtctgaaaaccctgggcctcccaggcctgatccttgtccctccttccctcccttccttccctggggctgctgccagtgggcggtgaggcagcacctctggcttgcctcttgccggttcccccatgagggagaatggcctagggaagaggatactgtgaacagggaggtgggcagtaccacagatggaggcttttatccccgcagcctcccgcagggctctgctgcactgcctgaggaaagcaggcatgaaggaaagtgtcagtgaaacctaggcctggctccctaagtgagcctaggaggccctatcctgaaatccctgttacttgggctcattggacagatgctgactccaaggcctggattggcctgattctgtccctgttgtgtggcctcctctccataacctccaccccacttggtgtcaaatacactcaggaggacctgtgcagccctgctgccctctgatcacaggttgtggtcccctccctcttgtcccactctggactctgcccccagtaaacaggtcaggtgggtactactcccagactcagagactggcaaaacattcctgtggattcatgctccttcaactactgccacttcaccccaagagtcagggcctaaaatgagccccagttgggcagcctgtgtctcttcatagttggcagttctgctccctgagaaagaagtgttctccctctgcgtctggaaatcaggactcctgaattctgctgaataatcttggatgacactcattcctgtttcagaacttcgtggctgacttcatgccctgcaggatcacttgttgctttctcctcatgtagctcccattgcctctctctggcatggtgacttgtggagagactggagtctctgtgagggagaagaataagagttgtagagaaggtcaggggtagatgtgtgtcatttgttgattctatggtaatgttaatggggtcctttacttttatgttcctctgtctccttacagtgagaagcaggcagccagtacccttgccacggtagaatggtgagtaccctgtctttcctcaggccattgtgttttctgtaatccatgtgtctttctctgtgaagctgccccacctgtcctagaccttgagctccaggctaccctgttcagctcctaaacatgttcatctgccctggagataaattagggtttctttagattgcaaaacatcagccagtatacagcactgggactggaagcttctagaaatcattttctgcatgtgctaggccccacactttcctcctactccctacccaccactggttctattaacccttcataacagccctcttcttgcttttcttgggtccccggtagaatctctgtgttctggtctgaaaagctgggccttctttatctcaagatctttggacttctggtgggtcctttgaatattgtggatgctatatcaggagtgactccaccaaaactgtggggcttctc

SEQ ID NO: 22 - DNA, 3001 bp, homo sapiens
tgtgatagagttttgaataaatgttgtagttattgtaattattaaatattatagtaagtgttgggaatgaataaaaatataattatcgttttataggagtttagtatttaattaaaaaatttatagtatttgttagattgtaggttgttttagattttggagtttaagtagtgtaaagtttttgtttttttggaatttattaatagtattggagttttaacgttttataaataaagatgggtgaggatattagtttcgggttaattaaagcgtttaggttcgttttagatttgagaatattagttgaatttgaattaattgttttttatttttgtcggttggtggtatcgcggggttacggcgatttttagcggttatttttcgttttgtggtttgttttgggttttcgggaaggaaagggaggggcgataagtcgggtttttgggagcgttttggttttttttcgttttatagattaggaggtcgtagttagttggtagttttagatttaggttttttatttttgggatgagaggagagttttttatttaggattgttagcgtaatgtaggtcgtgaagaattgtagggtcgtttatcgatataaagtgagtgttggaggaatttattaagatataggaagggggaaattttagcgtcgttagtcggagatgattaagattgaattttaggtttagttttttttttttttttagtttgtaggttttttttttattttggcgttgggatcggatgatagttgcgaaattaaaacgggaatggataaattgaggtgttattggggatttgttttagaagtattttttgggcggggttattatcggaagtggttttaggtatgtaatttataatgttcgtttttaattgcgttattagtaggcgacgagtcgtttttattttcggtttttagagtagtggttagtagttttttttttattgtttttttattggttgtcgtaaggacgcgttgtgattttttattggtcgcgtttttttttcggcgtcgcgttttttttttttaggtatagtttcgtttttaggtattcgattggttaaaggttgggagggcgtttgttcgattcgattaatgagtggggtcgagagtgagggcggtggttgcgtgatgggggtagggcgggatttggcgtggttattggttagggcgggtataggttagagatatgattggtttaggagaggggtattgtggtggggtcgggattgcgcggttttagtagttgcgggagacggaagtggtaagagcgcggttttagagggtcgggcggacgtcgtttgggtgagttatcgtgttttttgtattgtaagtttgggaatcgtaacgatcgcgttttgttcggtttcgttttggtttttatcggtttttttgagtttcgttttttgttatttggggtttcgttttttagtttttaggtttcgtttttagaatttgggtatttgggtttttttgttaatttggttcgttttttgggattagattttttaggtttgaaaattttgggttttttaggtttgatttttgttttttttttttttttttttttttttggggttgttgttagtgggcggtgaggtagtatttttggtttgttttttgtcggtttttttatgagggagaatggtttagggaagaggatattgtgaatagggaggtgggtagtattatagatggaggtttttattttcgtagtttttcgtagggttttgttgtattgtttgaggaaagtaggtatgaaggaaagtgttagtgaaatttaggtttggttttttaagtgagtttaggaggttttattttgaaatttttgttatttgggtttattggatagatgttgattttaaggtttggattggtttgattttgtttttgttgtgtggttttttttttataatttttattttatttggtgttaaatatatttaggaggatttgtgtagttttgttgttttttgattataggttgtggtttttttttttttgttttattttggattttgtttttagtaaataggttaggtgggtattatttttagatttagagattggtaaaatatttttgtggatttatgtttttttaattattgttattttattttaagagttagggtttaaaatgagttttagttgggtagtttgtgtttttttatagttggtagttttgttttttgagaaagaagtgttttttttttgcgtttggaaattaggatttttgaattttgttgaataattttggatgatatttatttttgttttagaatttcgtggttgattttatgttttgtaggattatttgttgttttttttttatgtagtttttattgtttttttttggtatggtgatttgtggagagattggagtttttgtgagggagaagaataagagttgtagagaaggttaggggtagatgtgtgttatttgttgattttatggtaatgttaatggggttttttatttttatgtttttttgtttttttatagtgagaagtaggtagttagtatttttgttacggtagaatggtgagtattttgtttttttttaggttattgtgttttttgtaatttatgtgtttttttttgtgaagttgttttatttgttttagattttgagttttaggttattttgtttagtttttaaatatgtttatttgttttggagataaattagggtttttttagattgtaaaatattagttagtatatagtattgggattggaagtttttagaaattattttttgtatgtgttaggttttatattttttttttattttttatttattattggttttattaattttttataatagttttttttttgttttttttgggttttcggtagaatttttgtgttttggtttgaaaagttgggttttttttattttaagatttttggatttttggtgggttttttgaatattgtggatgttatattaggagtgattttattaaaattgtggggtttttt

SEQ ID NO: 23 - DNA, 3001 bp, homo sapiens
tgtgatagagttttgaataaatgttgtagttattgtaattattaaatattatagtaagtgttgggaatgaataaaaatataattattgttttataggagtttagtatttaattaaaaaatttatagtatttgttagattgtaggttgttttagattttggagtttaagtagtgtaaagtttttgtttttttggaatttattaatagtattggagttttaatgttttataaataaagatgggtgaggatattagttttgggttaattaaagtgtttaggtttgttttagatttgagaatattagttgaatttgaattaattgttttttatttttgttggttggtggtattgtggggttatggtgatttttagtggttattttttgttttgtggtttgttttgggtttttgggaaggaaagggaggggtgataagttgggtttttgggagtgttttggtttttttttgttttatagattaggaggttgtagttagttggtagttttagatttaggttttttatttttgggatgagaggagagttttttatttaggattgttagtgtaatgtaggttgtgaagaattgtagggttgtttattgatataaagtgagtgttggaggaatttattaagatataggaagggggaaattttagtgttgttagttggagatgattaagattgaattttaggtttagttttttttttttttttagtttgtaggttttttttttattttggtgttgggattggatgatagttgtgaaattaaaatgggaatggataaattgaggtgttattggggatttgttttagaagtattttttgggtggggttattattggaagtggttttaggtatgtaatttataatgtttgtttttaattgtgttattagtaggtgatgagttgtttttatttttggtttttagagtagtggttagtagttttttttttattgtttttttattggttgttgtaaggatgtgttgtgattttttattggttgtgttttttttttggtgttgtgttttttttttttaggtatagttttgtttttaggtatttgattggttaaaggttgggagggtgtttgtttgatttgattaatgagtggggttgagagtgagggtggtggttgtgtgatgggggtagggtgggatttggtgtggttattggttagggtgggtataggttagagatatgattggtttaggagaggggtattgtggtggggttgggattgtgtggttttagtagttgtgggagatggaagtggtaagagtgtggttttagagggttgggtggatgttgtttgggtgagttattgtgttttttgtattgtaagtttgggaattgtaatgattgtgttttgtttggttttgttttggtttttattggtttttttgagttttgttttttgttatttggggttttgttttttagtttttaggttttgtttttagaatttgggtatttgggtttttttgttaatttggtttgttttttgggattagattttttaggtttgaaaattttgggttttttaggtttgatttttgttttttttttttttttttttttttttggggttgttgttagtgggtggtgaggtagtatttttggtttgttttttgttggtttttttatgagggagaatggtttagggaagaggatattgtgaatagggaggtgggtagtattatagatggaggtttttatttttgtagttttttgtagggttttgttgtattgtttgaggaaagtaggtatgaaggaaagtgttagtgaaatttaggtttggttttttaagtgagtttaggaggttttattttgaaatttttgttatttgggtttattggatagatgttgattttaaggtttggattggtttgattttgtttttgttgtgtggttttttttttataatttttattttatttggtgttaaatatatttaggaggatttgtgtagttttgttgttttttgattataggttgtggtttttttttttttgttttattttggattttgtttttagtaaataggttaggtgggtattatttttagatttagagattggtaaaatatttttgtggatttatgtttttttaattattgttattttattttaagagttagggtttaaaatgagttttagttgggtagtttgtgtttttttatagttggtagttttgttttttgagaaagaagtgttttttttttgtgtttggaaattaggatttttgaattttgttgaataattttggatgatatttatttttgttttagaattttgtggttgattttatgttttgtaggattatttgttgttttttttttatgtagtttttattgtttttttttggtatggtgatttgtggagagattggagtttttgtgagggagaagaataagagttgtagagaaggttaggggtagatgtgtgttatttgttgattttatggtaatgttaatggggttttttatttttatgtttttttgtttttttatagtgagaagtaggtagttagtatttttgttatggtagaatggtgagtattttgtttttttttaggttattgtgttttttgtaatttatgtgtttttttttgtgaagttgttttatttgttttagattttgagttttaggttattttgtttagtttttaaatatgtttatttgttttggagataaattagggtttttttagattgtaaaatattagttagtatatagtattgggattggaagtttttagaaattattttttgtatgtgttaggttttatattttttttttattttttatttattattggttttattaattttttataatagttttttttttgttttttttgggtttttggtagaatttttgtgttttggtttgaaaagttgggttttttttattttaagatttttggatttttggtgggttttttgaatattgtggatgttatattaggagtgattttattaaaattgtggggtttttt

SEQ ID NO: 24 - DNA, 3001 bp, homo sapiens
gagaagttttatagttttggtggagttatttttgatatagtatttataatatttaaaggatttattagaagtttaaagattttgagataaagaaggtttagttttttagattagaatatagagattttatcggggatttaagaaaagtaagaagagggttgttatgaagggttaatagaattagtggtgggtagggagtaggaggaaagtgtggggtttagtatatgtagaaaatgatttttagaagtttttagttttagtgttgtatattggttgatgttttgtaatttaaagaaattttaatttatttttagggtagatgaatatgtttaggagttgaatagggtagtttggagtttaaggtttaggataggtggggtagttttatagagaaagatatatggattatagaaaatataatggtttgaggaaagatagggtatttattattttatcgtggtaagggtattggttgtttgttttttattgtaaggagatagaggaatataaaagtaaaggattttattaatattattatagaattaataaatgatatatatttatttttgattttttttataatttttattttttttttttatagagattttagtttttttataagttattatgttagagagaggtaatgggagttatatgaggagaaagtaataagtgattttgtagggtatgaagttagttacgaagttttgaaataggaatgagtgttatttaagattatttagtagaatttaggagttttgatttttagacgtagagggagaatattttttttttagggagtagaattgttaattatgaagagatataggttgtttaattggggtttattttaggttttgatttttggggtgaagtggtagtagttgaaggagtatgaatttataggaatgttttgttagtttttgagtttgggagtagtatttatttgatttgtttattgggggtagagtttagagtgggataagagggaggggattataatttgtgattagagggtagtagggttgtataggtttttttgagtgtatttgatattaagtggggtggaggttatggagaggaggttatataatagggatagaattaggttaatttaggttttggagttagtatttgtttaatgagtttaagtaatagggattttaggatagggttttttaggtttatttagggagttaggtttaggttttattgatatttttttttatgtttgttttttttaggtagtgtagtagagttttgcgggaggttgcggggataaaagtttttatttgtggtattgtttatttttttgtttatagtatttttttttttaggttatttttttttatgggggaatcggtaagaggtaagttagaggtgttgttttatcgtttattggtagtagttttagggaaggaagggagggaaggagggataaggattaggtttgggaggtttagggtttttagatttaggggatttggttttagggggcgggttaggttggtaggggagtttaggtgtttaggttttaggggcggagtttaaagattgggaggcggagttttaaatgatagaaggcgggatttaggaaagtcggtgggggttagggcggagtcgggtaagacgcggtcgttgcggtttttaggtttgtagtgtagggggtacggtgatttatttaggcggcgttcgttcgattttttgaggtcgcgtttttgttattttcgtttttcgtagttgttgaggtcgcgtagtttcgattttattatagtgttttttttttgaattaattatatttttagtttgtattcgttttggttaatggttacgttaagtttcgttttgtttttattacgtagttatcgtttttattttcgattttatttattggtcgagtcgggtaaacgtttttttagtttttagttaatcggatgtttaaagacgagattatatttggaggaaggaggcgcggcgtcggaggggagacgcgattaatgggaaattatagcgcgtttttgcggtagttaataggagagtagtaaagagggggttgttggttattgttttggggatcggaagtggaggcggttcgtcgtttattggtagcgtaattagaggcgggtattgtaggttatatgtttaaagttattttcggtgatggtttcgtttaggaggtatttttgaaataggtttttagtggtattttagtttatttattttcgttttggtttcgtagttgttattcggttttaacgttagaataggagaaaaatttgtaggttaagagagaagggagggttgggtttgaggtttagttttggttattttcgattggcggcgttaggatttttttttttttgtgttttgatgggtttttttaatatttattttgtatcgataaacgattttgtagttttttacgatttgtattgcgttggtagttttgagtgaagaattttttttttattttagagatgggaaatttggatttgagattgttagttagttgcggttttttagtttgtaaagcgaagggagattaggacgtttttaaggattcggtttatcgtttttttttttttttttcggggatttagaatagattataagacggagggtggtcgttggaggtcgtcgtggtttcgcgatattattaatcgatagaaatggagaatagttgatttagatttagttgatatttttaggtttggagcgggtttgagcgttttaattagttcggggttaatgtttttatttatttttgtttatagaacgttgaaattttagtattgttggtaagttttaggaagataggaattttgtattatttgaattttagggtttagaatagtttgtaatttagtagatgttgtaaattttttaattaaatattgaatttttgtaggacggtgattgtgtttttatttatttttagtatttattatagtgtttggtgattataatggttgtagtatttgtttaaagttttattata

SEQ ID NO: 25 - DNA, 3001 bp, homo sapiens
gagaagttttatagttttggtggagttatttttgatatagtatttataatatttaaaggatttattagaagtttaaagattttgagataaagaaggtttagttttttagattagaatatagagattttattggggatttaagaaaagtaagaagagggttgttatgaagggttaatagaattagtggtgggtagggagtaggaggaaagtgtggggtttagtatatgtagaaaatgatttttagaagtttttagttttagtgttgtatattggttgatgttttgtaatttaaagaaattttaatttatttttagggtagatgaatatgtttaggagttgaatagggtagtttggagtttaaggtttaggataggtggggtagttttatagagaaagatatatggattatagaaaatataatggtttgaggaaagatagggtatttattattttattgtggtaagggtattggttgtttgttttttattgtaaggagatagaggaatataaaagtaaaggattttattaatattattatagaattaataaatgatatatatttatttttgattttttttataatttttattttttttttttatagagattttagtttttttataagttattatgttagagagaggtaatgggagttatatgaggagaaagtaataagtgattttgtagggtatgaagttagttatgaagttttgaaataggaatgagtgttatttaagattatttagtagaatttaggagttttgatttttagatgtagagggagaatattttttttttagggagtagaattgttaattatgaagagatataggttgtttaattggggtttattttaggttttgatttttggggtgaagtggtagtagttgaaggagtatgaatttataggaatgttttgttagtttttgagtttgggagtagtatttatttgatttgtttattgggggtagagtttagagtgggataagagggaggggattataatttgtgattagagggtagtagggttgtataggtttttttgagtgtatttgatattaagtggggtggaggttatggagaggaggttatataatagggatagaattaggttaatttaggttttggagttagtatttgtttaatgagtttaagtaatagggattttaggatagggttttttaggtttatttagggagttaggtttaggttttattgatatttttttttatgtttgttttttttaggtagtgtagtagagttttgtgggaggttgtggggataaaagtttttatttgtggtattgtttatttttttgtttatagtatttttttttttaggttatttttttttatgggggaattggtaagaggtaagttagaggtgttgttttattgtttattggtagtagttttagggaaggaagggagggaaggagggataaggattaggtttgggaggtttagggtttttagatttaggggatttggttttagggggtgggttaggttggtaggggagtttaggtgtttaggttttaggggtggagtttaaagattgggaggtggagttttaaatgatagaaggtgggatttaggaaagttggtgggggttagggtggagttgggtaagatgtggttgttgtggtttttaggtttgtagtgtagggggtatggtgatttatttaggtggtgtttgtttgattttttgaggttgtgtttttgttatttttgttttttgtagttgttgaggttgtgtagttttgattttattatagtgttttttttttgaattaattatatttttagtttgtatttgttttggttaatggttatgttaagttttgttttgtttttattatgtagttattgtttttatttttgattttatttattggttgagttgggtaaatgtttttttagtttttagttaattggatgtttaaagatgagattatatttggaggaaggaggtgtggtgttggaggggagatgtgattaatgggaaattatagtgtgtttttgtggtagttaataggagagtagtaaagagggggttgttggttattgttttggggattggaagtggaggtggtttgttgtttattggtagtgtaattagaggtgggtattgtaggttatatgtttaaagttatttttggtgatggttttgtttaggaggtatttttgaaataggtttttagtggtattttagtttatttatttttgttttggttttgtagttgttatttggttttaatgttagaataggagaaaaatttgtaggttaagagagaagggagggttgggtttgaggtttagttttggttatttttgattggtggtgttaggatttttttttttttgtgttttgatgggtttttttaatatttattttgtattgataaatgattttgtagttttttatgatttgtattgtgttggtagttttgagtgaagaattttttttttattttagagatgggaaatttggatttgagattgttagttagttgtggttttttagtttgtaaagtgaagggagattaggatgtttttaaggatttggtttattgttttttttttttttttttggggatttagaatagattataagatggagggtggttgttggaggttgttgtggttttgtgatattattaattgatagaaatggagaatagttgatttagatttagttgatatttttaggtttggagtgggtttgagtgttttaattagtttggggttaatgtttttatttatttttgtttatagaatgttgaaattttagtattgttggtaagttttaggaagataggaattttgtattatttgaattttagggtttagaatagtttgtaatttagtagatgttgtaaattttttaattaaatattgaatttttgtaggatggtgattgtgtttttatttatttttagtatttattatagtgtttggtgattataatggttgtagtatttgtttaaagttttattata

SEQ ID NO: 26 - DNA, 3141 bp, homo sapiens
gcccttgaggatttttgggagaagggagggtgttttttaactgggcagggagccccatctatcctggcccccaactcctccttacctgaagattctcttcctccttcactagttccttgggggggaacagatccttggcttggatgtactccaggctggggggcccctcctcaccctgtaggaaggccacagtcctaagtcaccaagctccacttagcccatcaggctcattctgctcctctccccaccaagaaatccacagatacccacacacacacacctctaaaggttctggtcaccagagaagggaaaagagatctgacttggttggagacagggaagggtgaaatggagagcatatcagcctattaagcctaaggaaagagtgaggccccaggaggaattgggaatctgcactcttcaaagagggactctcctatagaaccaacatttcaaaaatggaggagagaaaactaaggaaaagaaagactctttcccttagacccgcataagggtaaggcaggagtggggatgggaaagtgctgtcctgaggaaaaggagccaggtatggcagctggtttcagagagaagggaaatcaggcgcctacaagccactgaagcttcaatctggtgggtgaaggagacaaagaggagtgggtggggggattcagtcccacgcctctagagggccttcaccgacgctttcaaaaggaagacgtgtttgagagctgggcttatcttcttgttagacccacattgctgacaagcccccattacctgccaagtaacctgctctgcctgctaatcagaggggaattcctgaggaatacccacagcaagcaaaaggaactcccctcccaaccaccagggaggggacccggggggatccacgcgcctgggaggagccaggagacccaaggacagccaggggagagagagagaggaggcccggcagacacccacggggaaggtggggggacagctgagaggacagatgggggaagctgggaaggagcatcagccagagcgggaggaggggaggaccgggaatgatgcagaggtacggaaccctgcagaggcagggaagatggagaagagaggctgtctgggggacagtcaaggagaaaaggctggcatgccaggtgagggatggaatggtggaagagggaagggactggagccccaagccagctcaaagacatcccgtgctccccgaccaacctcctaacatcccattcagcctactagccacatcccacatccccaagcaaggattcagcgggtgggaccaagagggagaggcggaggtaaagggatgtacccctgcagggcggggcctagagatctgcagtcaagggcagtggctgcggggccaggatggaccacagaatttccattcctggccttcgaccatctccggcacccaaagattgaagcaagtccaagaaataaaagggttaacccaccttccctgccccccaaacgttcggggccgggccaggggcctcgggaagggggatgggctgaaatcgagggctgaccctgggcggggctgcgggtgcctcctaggcccccaaaggcagggtgggcacttacgaagcagctaagcatggagcaggagacgcgggcggtcaggctcatggtcgcgggcggtctgggccagcgcacatgtccccggagccgctgcgctgcccgccagccccgggcgcccgccgcatcccggctgcggggctcgccaggtgcagccgcggcggccaagaggctagggcgctggtggccgggcctccgcgcggctcccgcgcgcctctcccctcctctccacaatggagcgggcccagctccgccctcccgcacgagtgcagaagggaggggagccaggcgaggggagagcccgggaccgcggcgggaaggcggaggtagaggcggggcggctccgcgggccccgcccacaagcccagcctcctccctccccgcggaccctgggcctcgtaggagggcgtaccctactccagggacctttaggagctttcaggaatctgggctacgggaccgcccacatcttctcatttcccttcttctaaggtgagccaccccatgccctcttacaaacccatccccgcgccccctcccctaagttcccccgacgcctgctctggatcccaaggtggagctcacctacccgcaccccatttgcttcctcctttccctccaaaaccactacccaccatgcccctgcccatcagggtccttcaatcccgtgacttcgttaaacctttctttccccttagaatggtgccaggttagtcattccacgctcctggaaagggaaatgagctttttattccaacgcccctacccaaccctactccttcagctccatctctcccttgtttcacattctgatctctgggtaagaaagcccttcttggaggagaaaggatttcttagtctgggaaagtgaagagctagaagtatcgaccacagaagctatacaaaaaaacgaaacttgaaacccaggagcagcggagtagagagagttgggtagagggccaaggaataaggaccaggaataaggggctcaaaatgtcaccaagagtcacagagggaggtggctggaaccccaaacttcctgcaccttgtaactttcagacaccagggcttttgtcttgtttgggggagaagggagtaataaaagaaaacctgacattttattaagcatctacaatgagccaggcagtttctaacattatctcagtaaaacttttcaagccccaagaagtaaaccttatcctgtcttactcgtgagactcaagcttagagagaaagtatgtaatttaactaagtggtggtgctaggatttgaaattagatgaagctgactgtgaagcccatgctcttttcagggtagcccagaagagaaaaagaggagctatctgttggtgggggccaaaaccagcaggctttctgagaagagactgaaccaatagtgcacacaccaaatccacatgtctatggaaggaagggagggaaggaggaaatcctctcatctactgaattctttaacctgcccctaagcacaagggacacctaaaagacaccgaagagatactaccaggttaagggcctggtctgggccagggcc

SEQ ID NO: 27 - DNA, 3141 bp, homo sapiens
gtttttgaggatttttgggagaagggagggtgttttttaattgggtagggagttttatttattttggtttttaatttttttttatttgaagatttttttttttttttattagttttttgggggggaatagatttttggtttggatgtattttaggttggggggtttttttttattttgtaggaaggttatagttttaagttattaagttttatttagtttattaggtttattttgtttttttttttattaagaaatttatagatatttatatatatatatttttaaaggttttggttattagagaagggaaaagagatttgatttggttggagatagggaagggtgaaatggagagtatattagtttattaagtttaaggaaagagtgaggttttaggaggaattgggaatttgtattttttaaagagggatttttttatagaattaatattttaaaaatggaggagagaaaattaaggaaaagaaagatttttttttttagattcgtataagggtaaggtaggagtggggatgggaaagtgttgttttgaggaaaaggagttaggtatggtagttggttttagagagaagggaaattaggcgtttataagttattgaagttttaatttggtgggtgaaggagataaagaggagtgggtggggggatttagttttacgtttttagagggtttttatcgacgtttttaaaaggaagacgtgtttgagagttgggtttatttttttgttagatttatattgttgataagtttttattatttgttaagtaatttgttttgtttgttaattagaggggaatttttgaggaatatttatagtaagtaaaaggaattttttttttaattattagggaggggattcggggggatttacgcgtttgggaggagttaggagatttaaggatagttaggggagagagagagaggaggttcggtagatatttacggggaaggtggggggatagttgagaggatagatgggggaagttgggaaggagtattagttagagcgggaggaggggaggatcgggaatgatgtagaggtacggaattttgtagaggtagggaagatggagaagagaggttgtttgggggatagttaaggagaaaaggttggtatgttaggtgagggatggaatggtggaagagggaagggattggagttttaagttagtttaaagatatttcgtgtttttcgattaattttttaatattttatttagtttattagttatattttatatttttaagtaaggatttagcgggtgggattaagagggagaggcggaggtaaagggatgtatttttgtagggcggggtttagagatttgtagttaagggtagtggttgcggggttaggatggattatagaatttttatttttggttttcgattattttcggtatttaaagattgaagtaagtttaagaaataaaagggttaatttattttttttgttttttaaacgttcggggtcgggttaggggtttcgggaagggggatgggttgaaatcgagggttgattttgggcggggttgcgggtgttttttaggtttttaaaggtagggtgggtatttacgaagtagttaagtatggagtaggagacgcgggcggttaggtttatggtcgcgggcggtttgggttagcgtatatgttttcggagtcgttgcgttgttcgttagtttcgggcgttcgtcgtatttcggttgcggggttcgttaggtgtagtcgcggcggttaagaggttagggcgttggtggtcgggttttcgcgcggttttcgcgcgtttttttttttttttttataatggagcgggtttagtttcgttttttcgtacgagtgtagaagggaggggagttaggcgaggggagagttcgggatcgcggcgggaaggcggaggtagaggcggggcggtttcgcgggtttcgtttataagtttagtttttttttttttcgcggattttgggtttcgtaggagggcgtattttattttagggatttttaggagtttttaggaatttgggttacgggatcgtttatatttttttatttttttttttttaaggtgagttattttatgtttttttataaatttattttcgcgtttttttttttaagttttttcgacgtttgttttggattttaaggtggagtttatttattcgtattttatttgtttttttttttttttttaaaattattatttattatgtttttgtttattagggttttttaatttcgtgatttcgttaaatttttttttttttttagaatggtgttaggttagttattttacgtttttggaaagggaaatgagttttttattttaacgtttttatttaattttatttttttagttttattttttttttgttttatattttgatttttgggtaagaaagttttttttggaggagaaaggattttttagtttgggaaagtgaagagttagaagtatcgattatagaagttatataaaaaaacgaaatttgaaatttaggagtagcggagtagagagagttgggtagagggttaaggaataaggattaggaataaggggtttaaaatgttattaagagttatagagggaggtggttggaattttaaattttttgtattttgtaatttttagatattagggtttttgttttgtttgggggagaagggagtaataaaagaaaatttgatattttattaagtatttataatgagttaggtagtttttaatattattttagtaaaattttttaagttttaagaagtaaattttattttgttttattcgtgagatttaagtttagagagaaagtatgtaatttaattaagtggtggtgttaggatttgaaattagatgaagttgattgtgaagtttatgttttttttagggtagtttagaagagaaaaagaggagttatttgttggtgggggttaaaattagtaggttttttgagaagagattgaattaatagtgtatatattaaatttatatgtttatggaaggaagggagggaaggaggaaatttttttatttattgaattttttaatttgtttttaagtataagggatatttaaaagatatcgaagagatattattaggttaagggtttggtttgggttagggtt

SEQ ID NO: 28 - DNA, 3141 bp, homo sapiens
gtttttgaggatttttgggagaagggagggtgttttttaattgggtagggagttttatttattttggtttttaatttttttttatttgaagatttttttttttttttattagttttttgggggggaatagatttttggtttggatgtattttaggttggggggtttttttttattttgtaggaaggttatagttttaagttattaagttttatttagtttattaggtttattttgtttttttttttattaagaaatttatagatatttatatatatatatttttaaaggttttggttattagagaagggaaaagagatttgatttggttggagatagggaagggtgaaatggagagtatattagtttattaagtttaaggaaagagtgaggttttaggaggaattgggaatttgtattttttaaagagggatttttttatagaattaatattttaaaaatggaggagagaaaattaaggaaaagaaagatttttttttttagatttgtataagggtaaggtaggagtggggatgggaaagtgttgttttgaggaaaaggagttaggtatggtagttggttttagagagaagggaaattaggtgtttataagttattgaagttttaatttggtgggtgaaggagataaagaggagtgggtggggggatttagttttatgtttttagagggtttttattgatgtttttaaaaggaagatgtgtttgagagttgggtttatttttttgttagatttatattgttgataagtttttattatttgttaagtaatttgttttgtttgttaattagaggggaatttttgaggaatatttatagtaagtaaaaggaattttttttttaattattagggaggggatttggggggatttatgtgtttgggaggagttaggagatttaaggatagttaggggagagagagagaggaggtttggtagatatttatggggaaggtggggggatagttgagaggatagatgggggaagttgggaaggagtattagttagagtgggaggaggggaggattgggaatgatgtagaggtatggaattttgtagaggtagggaagatggagaagagaggttgtttgggggatagttaaggagaaaaggttggtatgttaggtgagggatggaatggtggaagagggaagggattggagttttaagttagtttaaagatattttgtgttttttgattaattttttaatattttatttagtttattagttatattttatatttttaagtaaggatttagtgggtgggattaagagggagaggtggaggtaaagggatgtatttttgtagggtggggtttagagatttgtagttaagggtagtggttgtggggttaggatggattatagaatttttatttttggtttttgattatttttggtatttaaagattgaagtaagtttaagaaataaaagggttaatttattttttttgttttttaaatgtttggggttgggttaggggttttgggaagggggatgggttgaaattgagggttgattttgggtggggttgtgggtgttttttaggtttttaaaggtagggtgggtatttatgaagtagttaagtatggagtaggagatgtgggtggttaggtttatggttgtgggtggtttgggttagtgtatatgtttttggagttgttgtgttgtttgttagttttgggtgtttgttgtattttggttgtggggtttgttaggtgtagttgtggtggttaagaggttagggtgttggtggttgggtttttgtgtggtttttgtgtgtttttttttttttttttataatggagtgggtttagttttgtttttttgtatgagtgtagaagggaggggagttaggtgaggggagagtttgggattgtggtgggaaggtggaggtagaggtggggtggttttgtgggttttgtttataagtttagttttttttttttttgtggattttgggttttgtaggagggtgtattttattttagggatttttaggagtttttaggaatttgggttatgggattgtttatatttttttatttttttttttttaaggtgagttattttatgtttttttataaatttatttttgtgtttttttttttaagtttttttgatgtttgttttggattttaaggtggagtttatttatttgtattttatttgtttttttttttttttttaaaattattatttattatgtttttgtttattagggttttttaattttgtgattttgttaaatttttttttttttttagaatggtgttaggttagttattttatgtttttggaaagggaaatgagttttttattttaatgtttttatttaattttatttttttagttttattttttttttgttttatattttgatttttgggtaagaaagttttttttggaggagaaaggattttttagtttgggaaagtgaagagttagaagtattgattatagaagttatataaaaaaatgaaatttgaaatttaggagtagtggagtagagagagttgggtagagggttaaggaataaggattaggaataaggggtttaaaatgttattaagagttatagagggaggtggttggaattttaaattttttgtattttgtaatttttagatattagggtttttgttttgtttgggggagaagggagtaataaaagaaaatttgatattttattaagtatttataatgagttaggtagtttttaatattattttagtaaaattttttaagttttaagaagtaaattttattttgttttatttgtgagatttaagtttagagagaaagtatgtaatttaattaagtggtggtgttaggatttgaaattagatgaagttgattgtgaagtttatgttttttttagggtagtttagaagagaaaaagaggagttatttgttggtgggggttaaaattagtaggttttttgagaagagattgaattaatagtgtatatattaaatttatatgtttatggaaggaagggagggaaggaggaaatttttttatttattgaattttttaatttgtttttaagtataagggatatttaaaagatattgaagagatattattaggttaagggtttggtttgggttagggtt

SEQ ID NO: 29 - DNA, 3141 bp, homo sapiens
ggttttggtttagattaggtttttaatttggtagtattttttcggtgttttttaggtgttttttgtgtttaggggtaggttaaagaatttagtagatgagaggatttttttttttttttttttttttttatagatatgtggatttggtgtgtgtattattggtttagtttttttttagaaagtttgttggttttggtttttattaatagatagttttttttttttttttttgggttattttgaaaagagtatgggttttatagttagttttatttaattttaaattttagtattattatttagttaaattatatattttttttttaagtttgagttttacgagtaagataggataaggtttattttttggggtttgaaaagttttattgagataatgttagaaattgtttggtttattgtagatgtttaataaaatgttaggtttttttttattattttttttttttttaaataagataaaagttttggtgtttgaaagttataaggtgtaggaagtttggggttttagttatttttttttgtgatttttggtgatattttgagttttttatttttggtttttattttttggttttttatttaattttttttatttcgttgtttttgggttttaagtttcgtttttttgtatagtttttgtggtcgatatttttagttttttatttttttagattaagaaatttttttttttttaagaagggtttttttatttagagattagaatgtgaaataagggagagatggagttgaaggagtagggttgggtaggggcgttggaataaaaagtttatttttttttttaggagcgtggaatgattaatttggtattattttaaggggaaagaaaggtttaacgaagttacgggattgaaggattttgatgggtaggggtatggtgggtagtggttttggagggaaaggaggaagtaaatggggtgcgggtaggtgagttttattttgggatttagagtaggcgtcgggggaatttaggggagggggcgcggggatgggtttgtaagagggtatggggtggtttattttagaagaagggaaatgagaagatgtgggcggtttcgtagtttagatttttgaaagtttttaaaggtttttggagtagggtacgtttttttacgaggtttagggttcgcggggagggaggaggttgggtttgtgggcggggttcgcggagtcgtttcgtttttattttcgttttttcgtcgcggtttcgggtttttttttcgtttggttttttttttttttgtattcgtgcgggagggcggagttgggttcgttttattgtggagaggaggggagaggcgcgcgggagtcgcgcggaggttcggttattagcgttttagttttttggtcgtcgcggttgtatttggcgagtttcgtagtcgggatgcggcgggcgttcggggttggcgggtagcgtagcggtttcggggatatgtgcgttggtttagatcgttcgcgattatgagtttgatcgttcgcgttttttgttttatgtttagttgtttcgtaagtgtttattttgtttttgggggtttaggaggtattcgtagtttcgtttagggttagttttcgattttagtttattttttttttcgaggtttttggttcggtttcgaacgtttggggggtagggaaggtgggttaatttttttattttttggatttgttttaatttttgggtgtcggagatggtcgaaggttaggaatggaaattttgtggtttattttggtttcgtagttattgtttttgattgtagatttttaggtttcgttttgtaggggtatatttttttattttcgttttttttttttggttttattcgttgaatttttgtttggggatgtgggatgtggttagtaggttgaatgggatgttaggaggttggtcggggagtacgggatgtttttgagttggtttggggttttagtttttttttttttttattattttattttttatttggtatgttagttttttttttttgattgttttttagatagttttttttttttattttttttgtttttgtagggtttcgtatttttgtattattttcggttttttttttttttcgttttggttgatgtttttttttagttttttttatttgtttttttagttgtttttttatttttttcgtgggtgtttgtcgggtttttttttttttttttttttggttgtttttgggttttttggttttttttaggcgcgtggattttttcgggttttttttttggtggttgggaggggagttttttttgtttgttgtgggtattttttaggaatttttttttgattagtaggtagagtaggttatttggtaggtaatgggggtttgttagtaatgtgggtttaataagaagataagtttagtttttaaatacgttttttttttgaaagcgtcggtgaaggttttttagaggcgtgggattgaatttttttatttatttttttttgttttttttatttattagattgaagttttagtggtttgtaggcgtttgattttttttttttttgaaattagttgttatatttggttttttttttttaggatagtatttttttatttttatttttgttttatttttatgcgggtttaagggaaagagttttttttttttttagtttttttttttttatttttgaaatgttggttttataggagagtttttttttgaagagtgtagatttttaattttttttggggttttattttttttttaggtttaataggttgatatgttttttattttatttttttttgtttttaattaagttagatttttttttttttttttggtgattagaatttttagaggtgtgtgtgtgtgggtatttgtggattttttggtggggagaggagtagaatgagtttgatgggttaagtggagtttggtgatttaggattgtggtttttttatagggtgaggaggggttttttagtttggagtatatttaagttaaggatttgtttttttttaaggaattagtgaaggaggaagagaatttttaggtaaggaggagttgggggttaggatagatggggttttttgtttagttaaaaaatattttttttttttttaaaaatttttaagggt

SEQ ID NO: 30 - DNA, 3141 bp, homo sapiens
ggttttggtttagattaggtttttaatttggtagtatttttttggtgttttttaggtgttttttgtgtttaggggtaggttaaagaatttagtagatgagaggatttttttttttttttttttttttttatagatatgtggatttggtgtgtgtattattggtttagtttttttttagaaagtttgttggttttggtttttattaatagatagttttttttttttttttttgggttattttgaaaagagtatgggttttatagttagttttatttaattttaaattttagtattattatttagttaaattatatattttttttttaagtttgagttttatgagtaagataggataaggtttattttttggggtttgaaaagttttattgagataatgttagaaattgtttggtttattgtagatgtttaataaaatgttaggtttttttttattattttttttttttttaaataagataaaagttttggtgtttgaaagttataaggtgtaggaagtttggggttttagttatttttttttgtgatttttggtgatattttgagttttttatttttggtttttattttttggttttttatttaattttttttattttgttgtttttgggttttaagttttgtttttttgtatagtttttgtggttgatatttttagttttttatttttttagattaagaaatttttttttttttaagaagggtttttttatttagagattagaatgtgaaataagggagagatggagttgaaggagtagggttgggtaggggtgttggaataaaaagtttatttttttttttaggagtgtggaatgattaatttggtattattttaaggggaaagaaaggtttaatgaagttatgggattgaaggattttgatgggtaggggtatggtgggtagtggttttggagggaaaggaggaagtaaatggggtgtgggtaggtgagttttattttgggatttagagtaggtgttgggggaatttaggggagggggtgtggggatgggtttgtaagagggtatggggtggtttattttagaagaagggaaatgagaagatgtgggtggttttgtagtttagatttttgaaagtttttaaaggtttttggagtagggtatgtttttttatgaggtttagggtttgtggggagggaggaggttgggtttgtgggtggggtttgtggagttgttttgtttttatttttgtttttttgttgtggttttgggttttttttttgtttggttttttttttttttgtatttgtgtgggagggtggagttgggtttgttttattgtggagaggaggggagaggtgtgtgggagttgtgtggaggtttggttattagtgttttagttttttggttgttgtggttgtatttggtgagttttgtagttgggatgtggtgggtgtttggggttggtgggtagtgtagtggttttggggatatgtgtgttggtttagattgtttgtgattatgagtttgattgtttgtgttttttgttttatgtttagttgttttgtaagtgtttattttgtttttgggggtttaggaggtatttgtagttttgtttagggttagtttttgattttagtttatttttttttttgaggtttttggtttggttttgaatgtttggggggtagggaaggtgggttaatttttttattttttggatttgttttaatttttgggtgttggagatggttgaaggttaggaatggaaattttgtggtttattttggttttgtagttattgtttttgattgtagatttttaggttttgttttgtaggggtatatttttttatttttgttttttttttttggttttatttgttgaatttttgtttggggatgtgggatgtggttagtaggttgaatgggatgttaggaggttggttggggagtatgggatgtttttgagttggtttggggttttagtttttttttttttttattattttattttttatttggtatgttagttttttttttttgattgttttttagatagttttttttttttattttttttgtttttgtagggttttgtatttttgtattatttttggtttttttttttttttgttttggttgatgtttttttttagttttttttatttgtttttttagttgtttttttattttttttgtgggtgtttgttgggtttttttttttttttttttttggttgtttttgggttttttggttttttttaggtgtgtggatttttttgggttttttttttggtggttgggaggggagttttttttgtttgttgtgggtattttttaggaatttttttttgattagtaggtagagtaggttatttggtaggtaatgggggtttgttagtaatgtgggtttaataagaagataagtttagtttttaaatatgttttttttttgaaagtgttggtgaaggttttttagaggtgtgggattgaatttttttatttatttttttttgttttttttatttattagattgaagttttagtggtttgtaggtgtttgattttttttttttttgaaattagttgttatatttggttttttttttttaggatagtatttttttatttttatttttgttttatttttatgtgggtttaagggaaagagttttttttttttttagtttttttttttttatttttgaaatgttggttttataggagagtttttttttgaagagtgtagatttttaattttttttggggttttattttttttttaggtttaataggttgatatgttttttattttatttttttttgtttttaattaagttagatttttttttttttttttggtgattagaatttttagaggtgtgtgtgtgtgggtatttgtggattttttggtggggagaggagtagaatgagtttgatgggttaagtggagtttggtgatttaggattgtggtttttttatagggtgaggaggggttttttagtttggagtatatttaagttaaggatttgtttttttttaaggaattagtgaaggaggaagagaatttttaggtaaggaggagttgggggttaggatagatggggttttttgtttagttaaaaaatattttttttttttttaaaaatttttaagggt

SEQ ID NO: 31 - DNA, 50 bp, homo sapiens
ctttaattagcccggggctaatgtcctcacccatctttgtttatagaacg

SEQ ID NO: 32 - DNA, 50 bp, homo sapiens
ttttaattagttcggggttaatgtttttatttatttttgtttatagaacg

SEQ ID NO: 33 - DNA, 50 bp, homo sapiens
ttttaattagtttggggttaatgtttttatttatttttgtttatagaatg

SEQ ID NO: 34 - DNA, 50 bp, homo sapiens
cgttttataaataaagatgggtgaggatattagtttcgggttaattaaag

SEQ ID NO: 35 - DNA, 50 bp, homo sapiens
tgttttataaataaagatgggtgaggatattagttttgggttaattaaag

SEQ ID NO: 36 - DNA, 3001 bp, homo sapiens
ggataaaagcctccatctgtggtactgcccacctccctgttcacagtatcctcttccctaggccattctccctcatgggggaaccggcaagaggcaagccagaggtgctgcctcaccgcccactggcagcagccccagggaaggaagggagggaaggagggacaaggatcaggcctgggaggcccagggttttcagacctaggggatctggtcccagggggcgggccaggttggcaggggagcccaggtgcccaggttctaggggcggagcctaaagactgggaggcggagccccaaatgacagaaggcgggactcaggaaagccggtgggggccagggcggagccgggcaagacgcggtcgttgcggttcccaggcttgcagtgcagggggcacggtgactcacccaggcggcgtccgcccgaccctctgaggccgcgctcttgccacttccgtctcccgcagctgctgaggccgcgcagtcccgaccccaccacagtgcccctctcctgaaccaatcatatctctagcctgtacccgccctggccaatggccacgccaagtcccgccctgcccccatcacgcagccaccgccctcactctcgaccccactcattggtcgagtcgggcaaacgccctcccagcctttagccaatcggatgcctaaagacgagactatacctggaggaaggaggcgcggcgccggaggggagacgcgaccaatgggaaatcacagcgcgtccttgcggcagccaataggagagcagtaaagagggggctgctggccactgctctggggaccggaagtggaggcggctcgtcgcctactggtagcgcaattagaggcgggcattgtaggttacatgcctaaagccacttccggtgatggccccgcccaggaggtacttctgaaacaggtccccagtggcacctcagtttatccattcccgttttggtttcgcagctgtcatccggtcccaacgccagaataggagaaaaacctgcaggctaagagagaagggagggctgggcctgaggttcagtcttggtcatctccgactggcggcgctaggatttcccccttcctgtgtcttgatgggttcctccaacactcactttgtatcgataaacgaccctgcagttcttcacgacctgcattgcgctggcagtcctgagtgaagaactctcctctcatcccagagatgggaaacctggatctgagactgccagctagctgcggcctcctagtctgtaaagcgaagggagaccaggacgctcccaaggacccggcttatcgcccctccctttccttcccggggacccagaacagaccacaagacggagggtggccgctggaggtcgccgtggccccgcgataccaccaaccgacagaaatggagaacagttgattcagattcagctgatattctcaggtctggagcgggcctgagcgctttaattagcccggggctaatgtcctcacccatctttgtttatagaacgttgaaactccagtactgttggtaagttccaggaagacaggaactttgcactacttgaactccagggtctagaacagcctgcaatctagcagatgctgtaaattttttaattaaatactgaactcctgtaggacggtgattgtgtttttattcattcccagcacttactatagtgtttggtgattacaatggctgcagcatttgttcaaagctctatcacaggctttctacagtgtagagcttaacctgcctatcccttttcccagatcaggggaaacagaaagtcaggaggttgcacgcagttaataccttgtgttttcccaagggcaggtatcaaatacaaaactgcgtccgccgcagctggaatacgcacaggcatcaaaatggggccttttgggccgggcgcggtggctcatgcctgtaatcccagcaccttggggggccgaggcgggcggatctcaaggtcaggagatcgaggtcatcctggctaacacggtgaaaccccgtctctactaaaaatacaaaaaattagtcgggcgtggtggcgggcgcctgtagtcccagctacggagtcttgtagtcccagctacggagcttgcagtgagccgagatagcgccgttgcactccagcctgggcgacagagcgagactccgcctcaaaaaaaaaaagggcaggggggacttttggacagtcctttaatattggggaagtgccccaaatttctttttctttttatttttcttttttttttttgagacggagtctcgccctgtcacccaggctggagtgcagtggcgccatctcagctcacttcaagctccgcctcccgggttcagccattctcctgcctcagcctcccgagtagctgggactacaggcgcccgccaccacgcccggctattttgtatttttagtagagacagggtttcactttctccttagccaggagaagtgccccaaatttctaatcccttaagccaggaccttggtagccctgaggtgtgatgggagactctggacagaaccacctgttgacctatccaggacccaaatatgcaccacaggtaggaatctttttattaccaaaggtactgtatgtgtgaaagatggagagagacccagaccccagataacagaggcatgatagatatgatcgtcaagatggagaagccaggctggattctaagcagggacttagaaggggaaaggaagtggaaagttttccccactctcccttccctactaaaagccagaaaccaacatcttctaccattagcctttcaaaactgggtcccaggatcttgatctccaggtcataaaaatacacacagggacaccagaagccacctacagatttattaaactttatttcctctgagtctctgggcagtcagcagggatgtaaggcgaagtggcagtagctgaaggggcctgagcagagctggtgctgggaggggccggcatggacaggaagaagaggaggagatttaaatatccag

SEQ ID NO: 37 - DNA, 3001 bp, homo sapiens
ggataaaagtttttatttgtggtattgtttatttttttgtttatagtatttttttttttaggttatttttttttatgggggaatcggtaagaggtaagttagaggtgttgttttatcgtttattggtagtagttttagggaaggaagggagggaaggagggataaggattaggtttgggaggtttagggtttttagatttaggggatttggttttagggggcgggttaggttggtaggggagtttaggtgtttaggttttaggggcggagtttaaagattgggaggcggagttttaaatgatagaaggcgggatttaggaaagtcggtgggggttagggcggagtcgggtaagacgcggtcgttgcggtttttaggtttgtagtgtagggggtacggtgatttatttaggcggcgttcgttcgattttttgaggtcgcgtttttgttattttcgtttttcgtagttgttgaggtcgcgtagtttcgattttattatagtgttttttttttgaattaattatatttttagtttgtattcgttttggttaatggttacgttaagtttcgttttgtttttattacgtagttatcgtttttattttcgattttatttattggtcgagtcgggtaaacgtttttttagtttttagttaatcggatgtttaaagacgagattatatttggaggaaggaggcgcggcgtcggaggggagacgcgattaatgggaaattatagcgcgtttttgcggtagttaataggagagtagtaaagagggggttgttggttattgttttggggatcggaagtggaggcggttcgtcgtttattggtagcgtaattagaggcgggtattgtaggttatatgtttaaagttattttcggtgatggtttcgtttaggaggtatttttgaaataggtttttagtggtattttagtttatttattttcgttttggtttcgtagttgttattcggttttaacgttagaataggagaaaaatttgtaggttaagagagaagggagggttgggtttgaggtttagttttggttattttcgattggcggcgttaggatttttttttttttgtgttttgatgggtttttttaatatttattttgtatcgataaacgattttgtagttttttacgatttgtattgcgttggtagttttgagtgaagaattttttttttattttagagatgggaaatttggatttgagattgttagttagttgcggttttttagtttgtaaagcgaagggagattaggacgtttttaaggattcggtttatcgtttttttttttttttttcggggatttagaatagattataagacggagggtggtcgttggaggtcgtcgtggtttcgcgatattattaatcgatagaaatggagaatagttgatttagatttagttgatatttttaggtttggagcgggtttgagcgttttaattagttcggggttaatgtttttatttatttttgtttatagaacgttgaaattttagtattgttggtaagttttaggaagataggaattttgtattatttgaattttagggtttagaatagtttgtaatttagtagatgttgtaaattttttaattaaatattgaatttttgtaggacggtgattgtgtttttatttatttttagtatttattatagtgtttggtgattataatggttgtagtatttgtttaaagttttattataggttttttatagtgtagagtttaatttgtttatttttttttttagattaggggaaatagaaagttaggaggttgtacgtagttaatattttgtgtttttttaagggtaggtattaaatataaaattgcgttcgtcgtagttggaatacgtataggtattaaaatggggttttttgggtcgggcgcggtggtttatgtttgtaattttagtattttggggggtcgaggcgggcggattttaaggttaggagatcgaggttattttggttaatacggtgaaatttcgtttttattaaaaatataaaaaattagtcgggcgtggtggcgggcgtttgtagttttagttacggagttttgtagttttagttacggagtttgtagtgagtcgagatagcgtcgttgtattttagtttgggcgatagagcgagatttcgttttaaaaaaaaaaagggtaggggggatttttggatagttttttaatattggggaagtgttttaaatttttttttttttttattttttttttttttttttgagacggagtttcgttttgttatttaggttggagtgtagtggcgttattttagtttattttaagtttcgtttttcgggtttagttatttttttgttttagtttttcgagtagttgggattataggcgttcgttattacgttcggttattttgtatttttagtagagatagggttttattttttttttagttaggagaagtgttttaaatttttaattttttaagttaggattttggtagttttgaggtgtgatgggagattttggatagaattatttgttgatttatttaggatttaaatatgtattataggtaggaatttttttattattaaaggtattgtatgtgtgaaagatggagagagatttagattttagataatagaggtatgatagatatgatcgttaagatggagaagttaggttggattttaagtagggatttagaaggggaaaggaagtggaaagttttttttatttttttttttttattaaaagttagaaattaatattttttattattagttttttaaaattgggttttaggattttgatttttaggttataaaaatatatatagggatattagaagttatttatagatttattaaattttattttttttgagtttttgggtagttagtagggatgtaaggcgaagtggtagtagttgaaggggtttgagtagagttggtgttgggaggggtcggtatggataggaagaagaggaggagatttaaatatttag

SEQ ID NO: 38 - DNA, 3001 bp, homo sapiens
ggataaaagtttttatttgtggtattgtttatttttttgtttatagtatttttttttttaggttatttttttttatgggggaattggtaagaggtaagttagaggtgttgttttattgtttattggtagtagttttagggaaggaagggagggaaggagggataaggattaggtttgggaggtttagggtttttagatttaggggatttggttttagggggtgggttaggttggtaggggagtttaggtgtttaggttttaggggtggagtttaaagattgggaggtggagttttaaatgatagaaggtgggatttaggaaagttggtgggggttagggtggagttgggtaagatgtggttgttgtggtttttaggtttgtagtgtagggggtatggtgatttatttaggtggtgtttgtttgattttttgaggttgtgtttttgttatttttgttttttgtagttgttgaggttgtgtagttttgattttattatagtgttttttttttgaattaattatatttttagtttgtatttgttttggttaatggttatgttaagttttgttttgtttttattatgtagttattgtttttatttttgattttatttattggttgagttgggtaaatgtttttttagtttttagttaattggatgtttaaagatgagattatatttggaggaaggaggtgtggtgttggaggggagatgtgattaatgggaaattatagtgtgtttttgtggtagttaataggagagtagtaaagagggggttgttggttattgttttggggattggaagtggaggtggtttgttgtttattggtagtgtaattagaggtgggtattgtaggttatatgtttaaagttatttttggtgatggttttgtttaggaggtatttttgaaataggtttttagtggtattttagtttatttatttttgttttggttttgtagttgttatttggttttaatgttagaataggagaaaaatttgtaggttaagagagaagggagggttgggtttgaggtttagttttggttatttttgattggtggtgttaggatttttttttttttgtgttttgatgggtttttttaatatttattttgtattgataaatgattttgtagttttttatgatttgtattgtgttggtagttttgagtgaagaattttttttttattttagagatgggaaatttggatttgagattgttagttagttgtggttttttagtttgtaaagtgaagggagattaggatgtttttaaggatttggtttattgttttttttttttttttttggggatttagaatagattataagatggagggtggttgttggaggttgttgtggttttgtgatattattaattgatagaaatggagaatagttgatttagatttagttgatatttttaggtttggagtgggtttgagtgttttaattagtttggggttaatgtttttatttatttttgtttatagaatgttgaaattttagtattgttggtaagttttaggaagataggaattttgtattatttgaattttagggtttagaatagtttgtaatttagtagatgttgtaaattttttaattaaatattgaatttttgtaggatggtgattgtgtttttatttatttttagtatttattatagtgtttggtgattataatggttgtagtatttgtttaaagttttattataggttttttatagtgtagagtttaatttgtttatttttttttttagattaggggaaatagaaagttaggaggttgtatgtagttaatattttgtgtttttttaagggtaggtattaaatataaaattgtgtttgttgtagttggaatatgtataggtattaaaatggggttttttgggttgggtgtggtggtttatgtttgtaattttagtattttggggggttgaggtgggtggattttaaggttaggagattgaggttattttggttaatatggtgaaattttgtttttattaaaaatataaaaaattagttgggtgtggtggtgggtgtttgtagttttagttatggagttttgtagttttagttatggagtttgtagtgagttgagatagtgttgttgtattttagtttgggtgatagagtgagattttgttttaaaaaaaaaaagggtaggggggatttttggatagttttttaatattggggaagtgttttaaatttttttttttttttattttttttttttttttttgagatggagttttgttttgttatttaggttggagtgtagtggtgttattttagtttattttaagttttgttttttgggtttagttatttttttgttttagttttttgagtagttgggattataggtgtttgttattatgtttggttattttgtatttttagtagagatagggttttattttttttttagttaggagaagtgttttaaatttttaattttttaagttaggattttggtagttttgaggtgtgatgggagattttggatagaattatttgttgatttatttaggatttaaatatgtattataggtaggaatttttttattattaaaggtattgtatgtgtgaaagatggagagagatttagattttagataatagaggtatgatagatatgattgttaagatggagaagttaggttggattttaagtagggatttagaaggggaaaggaagtggaaagttttttttatttttttttttttattaaaagttagaaattaatattttttattattagttttttaaaattgggttttaggattttgatttttaggttataaaaatatatatagggatattagaagttatttatagatttattaaattttattttttttgagtttttgggtagttagtagggatgtaaggtgaagtggtagtagttgaaggggtttgagtagagttggtgttgggaggggttggtatggataggaagaagaggaggagatttaaatatttag

SEQ ID NO: 39 - DNA, 3001 bp, homo sapiens
ttggatatttaaattttttttttttttttttgtttatgtcggttttttttagtattagttttgtttaggtttttttagttattgttatttcgttttatatttttgttgattgtttagagatttagaggaaataaagtttaataaatttgtaggtggtttttggtgtttttgtgtgtatttttatgatttggagattaagattttgggatttagttttgaaaggttaatggtagaagatgttggtttttggtttttagtagggaagggagagtggggaaaattttttattttttttttttttttaagtttttgtttagaatttagtttggtttttttattttgacgattatatttattatgtttttgttatttggggtttgggtttttttttattttttatatatatagtatttttggtaataaaaagatttttatttgtggtgtatatttgggttttggataggttaataggtggttttgtttagagttttttattatattttagggttattaaggttttggtttaagggattagaaatttggggtattttttttggttaaggagaaagtgaaattttgtttttattaaaaatataaaatagtcgggcgtggtggcgggcgtttgtagttttagttattcgggaggttgaggtaggagaatggttgaattcgggaggcggagtttgaagtgagttgagatggcgttattgtattttagtttgggtgatagggcgagatttcgttttaaaaaaaaaaaagaaaaataaaaagaaaaagaaatttggggtatttttttaatattaaaggattgtttaaaagttttttttgttttttttttttttgaggcggagtttcgttttgtcgtttaggttggagtgtaacggcgttatttcggtttattgtaagtttcgtagttgggattataagatttcgtagttgggattataggcgttcgttattacgttcgattaattttttgtatttttagtagagacggggttttatcgtgttagttaggatgatttcgattttttgattttgagattcgttcgtttcggttttttaaggtgttgggattataggtatgagttatcgcgttcggtttaaaaggttttattttgatgtttgtgcgtattttagttgcggcggacgtagttttgtatttgatatttgtttttgggaaaatataaggtattaattgcgtgtaattttttgattttttgttttttttgatttgggaaaagggataggtaggttaagttttatattgtagaaagtttgtgatagagttttgaataaatgttgtagttattgtaattattaaatattatagtaagtgttgggaatgaataaaaatataattatcgttttataggagtttagtatttaattaaaaaatttatagtatttgttagattgtaggttgttttagattttggagtttaagtagtgtaaagtttttgtttttttggaatttattaatagtattggagttttaacgttttataaataaagatgggtgaggatattagtttcgggttaattaaagcgtttaggttcgttttagatttgagaatattagttgaatttgaattaattgttttttatttttgtcggttggtggtatcgcggggttacggcgatttttagcggttatttttcgttttgtggtttgttttgggttttcgggaaggaaagggaggggcgataagtcgggtttttgggagcgttttggttttttttcgttttatagattaggaggtcgtagttagttggtagttttagatttaggttttttatttttgggatgagaggagagttttttatttaggattgttagcgtaatgtaggtcgtgaagaattgtagggtcgtttatcgatataaagtgagtgttggaggaatttattaagatataggaagggggaaattttagcgtcgttagtcggagatgattaagattgaattttaggtttagttttttttttttttttagtttgtaggttttttttttattttggcgttgggatcggatgatagttgcgaaattaaaacgggaatggataaattgaggtgttattggggatttgttttagaagtattttttgggcggggttattatcggaagtggttttaggtatgtaatttataatgttcgtttttaattgcgttattagtaggcgacgagtcgtttttattttcggtttttagagtagtggttagtagttttttttttattgtttttttattggttgtcgtaaggacgcgttgtgattttttattggtcgcgtttttttttcggcgtcgcgttttttttttttaggtatagtttcgtttttaggtattcgattggttaaaggttgggagggcgtttgttcgattcgattaatgagtggggtcgagagtgagggcggtggttgcgtgatgggggtagggcgggatttggcgtggttattggttagggcgggtataggttagagatatgattggtttaggagaggggtattgtggtggggtcgggattgcgcggttttagtagttgcgggagacggaagtggtaagagcgcggttttagagggtcgggcggacgtcgtttgggtgagttatcgtgttttttgtattgtaagtttgggaatcgtaacgatcgcgttttgttcggtttcgttttggtttttatcggtttttttgagtttcgttttttgttatttggggtttcgttttttagtttttaggtttcgtttttagaatttgggtatttgggtttttttgttaatttggttcgttttttgggattagattttttaggtttgaaaattttgggttttttaggtttgatttttgttttttttttttttttttttttttttggggttgttgttagtgggcggtgaggtagtatttttggtttgttttttgtcggtttttttatgagggagaatggtttagggaagaggatattgtgaatagggaggtgggtagtattatagatggaggtttttattt

SEQ ID NO: 40 - DNA, 3001 bp, homo sapiens
ttggatatttaaattttttttttttttttttgtttatgttggttttttttagtattagttttgtttaggtttttttagttattgttattttgttttatatttttgttgattgtttagagatttagaggaaataaagtttaataaatttgtaggtggtttttggtgtttttgtgtgtatttttatgatttggagattaagattttgggatttagttttgaaaggttaatggtagaagatgttggtttttggtttttagtagggaagggagagtggggaaaattttttattttttttttttttttaagtttttgtttagaatttagtttggtttttttattttgatgattatatttattatgtttttgttatttggggtttgggtttttttttattttttatatatatagtatttttggtaataaaaagatttttatttgtggtgtatatttgggttttggataggttaataggtggttttgtttagagttttttattatattttagggttattaaggttttggtttaagggattagaaatttggggtattttttttggttaaggagaaagtgaaattttgtttttattaaaaatataaaatagttgggtgtggtggtgggtgtttgtagttttagttatttgggaggttgaggtaggagaatggttgaatttgggaggtggagtttgaagtgagttgagatggtgttattgtattttagtttgggtgatagggtgagattttgttttaaaaaaaaaaaagaaaaataaaaagaaaaagaaatttggggtatttttttaatattaaaggattgtttaaaagttttttttgttttttttttttttgaggtggagttttgttttgttgtttaggttggagtgtaatggtgttattttggtttattgtaagttttgtagttgggattataagattttgtagttgggattataggtgtttgttattatgtttgattaattttttgtatttttagtagagatggggttttattgtgttagttaggatgattttgattttttgattttgagatttgtttgttttggttttttaaggtgttgggattataggtatgagttattgtgtttggtttaaaaggttttattttgatgtttgtgtgtattttagttgtggtggatgtagttttgtatttgatatttgtttttgggaaaatataaggtattaattgtgtgtaattttttgattttttgttttttttgatttgggaaaagggataggtaggttaagttttatattgtagaaagtttgtgatagagttttgaataaatgttgtagttattgtaattattaaatattatagtaagtgttgggaatgaataaaaatataattattgttttataggagtttagtatttaattaaaaaatttatagtatttgttagattgtaggttgttttagattttggagtttaagtagtgtaaagtttttgtttttttggaatttattaatagtattggagttttaatgttttataaataaagatgggtgaggatattagttttgggttaattaaagtgtttaggtttgttttagatttgagaatattagttgaatttgaattaattgttttttatttttgttggttggtggtattgtggggttatggtgatttttagtggttattttttgttttgtggtttgttttgggtttttgggaaggaaagggaggggtgataagttgggtttttgggagtgttttggtttttttttgttttatagattaggaggttgtagttagttggtagttttagatttaggttttttatttttgggatgagaggagagttttttatttaggattgttagtgtaatgtaggttgtgaagaattgtagggttgtttattgatataaagtgagtgttggaggaatttattaagatataggaagggggaaattttagtgttgttagttggagatgattaagattgaattttaggtttagttttttttttttttttagtttgtaggttttttttttattttggtgttgggattggatgatagttgtgaaattaaaatgggaatggataaattgaggtgttattggggatttgttttagaagtattttttgggtggggttattattggaagtggttttaggtatgtaatttataatgtttgtttttaattgtgttattagtaggtgatgagttgtttttatttttggtttttagagtagtggttagtagttttttttttattgtttttttattggttgttgtaaggatgtgttgtgattttttattggttgtgttttttttttggtgttgtgttttttttttttaggtatagttttgtttttaggtatttgattggttaaaggttgggagggtgtttgtttgatttgattaatgagtggggttgagagtgagggtggtggttgtgtgatgggggtagggtgggatttggtgtggttattggttagggtgggtataggttagagatatgattggtttaggagaggggtattgtggtggggttgggattgtgtggttttagtagttgtgggagatggaagtggtaagagtgtggttttagagggttgggtggatgttgtttgggtgagttattgtgttttttgtattgtaagtttgggaattgtaatgattgtgttttgtttggttttgttttggtttttattggtttttttgagttttgttttttgttatttggggttttgttttttagtttttaggttttgtttttagaatttgggtatttgggtttttttgttaatttggtttgttttttgggattagattttttaggtttgaaaattttgggttttttaggtttgatttttgttttttttttttttttttttttttttggggttgttgttagtgggtggtgaggtagtatttttggtttgttttttgttggtttttttatgagggagaatggtttagggaagaggatattgtgaatagggaggtgggtagtattatagatggaggtttttattt

SEQ ID NO: 41 - DNA, 50 bp, homo sapiens
cgtttgagagtcacaaacatgttttggcaatataaccagatgggactgga

SEQ ID NO: 42 - DNA, 50 bp, homo sapiens
cgtttgagagttataaatatgttttggtaatataattagatgggattgga

SEQ ID NO: 43 - DNA, 50 bp, homo sapiens
tgtttgagagttataaatatgttttggtaatataattagatgggattgga

SEQ ID NO: 44 - DNA, 50 bp, homo sapiens
tttagttttatttggttatattgttaaaatatgtttgtgatttttaaacg

SEQ ID NO: 45 - DNA, 50 bp, homo sapiens
tttagttttatttggttatattgttaaaatatgtttgtgatttttaaatg

SEQ ID NO: 46 - DNA, 3001 bp, homo sapiens
ctagacagaatggaagacagtctttctgtctccactcccttccatggagcatcaaatatcctgggcgcccacaccctgccaggcctaggcctgctgttgcgactgagtttgtctctacacctttactctcttcggcccttgcaactctttccctttttctgcccacctttgtgaaatggctaagcaggaaactccacagataaacgattgtccagttttagtttgaactgttaggactgaaaattgttctgtatttttctgtcaaaaaaagaccaactttagtatgctcttttcaccttctcaaaattgtcttgtagttaaacactgtagttgagcctttatatctctcaattttatgttttgttttgttgaggaagcatctcactgttgcccagactggcaccatcatagctcactgcagcctcaatctcccagctcaagaaatcctcccacctcagcctcctgagtagttgggactatagatgtgtggcaccaagcccagcttgtttttttgtagcgacgggggtctcactatgctgcccaggctggtcaagcaatcctcccgcctcggcctcccaaggtgctactgtgagccactgcgccgggcccagttctatgtttaaaatacttccttctcaaccttatttatttttagagttgatggccacacctaaatattcctcctttcttatacaataccagtctttatcttcattgtctcactacttcggggactgaatggtctcctattttattgttaacatgccatatccttcaaaactgtacatcctccaaggtgtggttaatttctgcttttaacaggaaaatcagaggcctgcctgcttgagtcccccttcaagtactcagtatttgagtgtctactaagttataacagttaacgcacaaaattctagtcctcatgttgtttatactcaggtatttattgggagacacgcgtcagtagtccctgataaatggaaagatcgcttgagtccaggagttccagtccagcctagaataggtaaaacatgctctctgaattagtctttgaaactggtaaactagctcagaagtttttttaagaattccatgagtggtttgctggtgtacgtttattatatgcagtgaaagtacttaatctgcaaaccaccccaaattaagcccctaactcgcaagcacaaaatggactcgattatttactgagttatcagttggccttgtccttagttgtacagggactaatgactcacctataaataatgggctcttctaagaagacacagttgagttgacacctctttgtcctatagctgggaggaacgcattgcaaacgccaacccaatgattccctaaatggggtcttcgcatcagctgcgttaaaatcaccccagcaggcaggttatccggccgccactccagggtcattaaatcagactctccagtgggacctcggaattcgtagcttagcaagctccccaagtgatgctgggagtaaactaacgtttgagagtcacaaacatgttttggcaatataaccagatgggactggagaaattaaaaaatgagaaacatccctaaaaaagcaagactaagctgcgtgggaggccaaacgaggggggtcctttgggctgtttctaccatgacaaaaatcgccattaccccacacctctcacaccgccaacgttccgccaacgttccgccaacgtcccaccaccctcatgatatccgtccgcggtactgctccagcgaaggtacccttgcctgggccatgaggcgcaaccgtccctcacagctggggtggcttctccaggttcgcaccgaggggaagttggggtaccggtttccgccgccagcacccaagatggcggcacgagcgtcgcaaccacaagaaccacatgcttcgtgtcccgcctcagcattctcgggtctcactagacttttgcaagtcactgtgggaaccctcaaggcgagggtgttccgcactctggcggcgatacaccttcctattccctgacctaggccttcattcccccgccacagaaagcgctggaagcgcccaacctggatacttcacccaacgcccaagcccactaacatcgcccgccgcgaaggcgcggccgaggggcccagaatgccagacactagggccttcgccctcctcattggtgggtccataccgcggggcgggcctaggtactcattgggccgggaattatgtcagtcttgggaaatcaggtccggggatgaggaggtacactcagccattgggccctctctgctgccaatcagagggacatccgtcgacggccccggcctcggctcgttgattggagaaactgttcctagggtgtttgcggcgggcgggtttccgagtgcggtagcaggagggggcggggaggtaagcggaggctccgagctctaggccggccggcggtggcggcggcgaggccgggactcgggcttagggcctgctgtggaggcagcggcggacgccgagctaagcagtgggtatcgggcacattcctttcccagaagggagggttgcagcgccgcggggccgaggcttatggggcgacgggatggtgctgaggtgcaggaggcgggggccgagcggggttcccgccagagcccggccctgggcctgacagggaggggccccgcgcggggccgagaggaaagctggctccggggtgggatggactgggcagggttgagggcacgagaaggcgtggtgtgaggcctggacttgggagtggggtggggccatcgggacggagggcggggtggggtttgctgtaagggtgggtcaaggccagggaagtagcacttgttcgctggccgcccctggaggctagaagctccggcgccgagagtgggcatggcgacttggtctcagccggactcgggtatccgggcagggtgggaccagcctcaggctatgggccctgcacctacttgatttttaagggactttgtccggttcctcgaacttaattggctc

SEQ ID NO: 47 - DNA, 3001 bp, homo sapiens
ttagatagaatggaagatagtttttttgtttttatttttttttatggagtattaaatattttgggcgtttatattttgttaggtttaggtttgttgttgcgattgagtttgtttttatatttttatttttttcggtttttgtaattttttttttttttttgtttatttttgtgaaatggttaagtaggaaattttatagataaacgattgtttagttttagtttgaattgttaggattgaaaattgttttgtatttttttgttaaaaaaagattaattttagtatgttttttttatttttttaaaattgttttgtagttaaatattgtagttgagtttttatattttttaattttatgttttgttttgttgaggaagtattttattgttgtttagattggtattattatagtttattgtagttttaattttttagtttaagaaatttttttattttagttttttgagtagttgggattatagatgtgtggtattaagtttagtttgtttttttgtagcgacgggggttttattatgttgtttaggttggttaagtaattttttcgtttcggttttttaaggtgttattgtgagttattgcgtcgggtttagttttatgtttaaaatattttttttttaattttatttatttttagagttgatggttatatttaaatatttttttttttttatataatattagtttttatttttattgttttattatttcggggattgaatggttttttattttattgttaatatgttatattttttaaaattgtatattttttaaggtgtggttaatttttgtttttaataggaaaattagaggtttgtttgtttgagtttttttttaagtatttagtatttgagtgtttattaagttataatagttaacgtataaaattttagtttttatgttgtttatatttaggtatttattgggagatacgcgttagtagtttttgataaatggaaagatcgtttgagtttaggagttttagtttagtttagaataggtaaaatatgttttttgaattagtttttgaaattggtaaattagtttagaagtttttttaagaattttatgagtggtttgttggtgtacgtttattatatgtagtgaaagtatttaatttgtaaattattttaaattaagtttttaattcgtaagtataaaatggattcgattatttattgagttattagttggttttgtttttagttgtatagggattaatgatttatttataaataatgggtttttttaagaagatatagttgagttgatatttttttgttttatagttgggaggaacgtattgtaaacgttaatttaatgattttttaaatggggttttcgtattagttgcgttaaaattattttagtaggtaggttattcggtcgttattttagggttattaaattagattttttagtgggatttcggaattcgtagtttagtaagttttttaagtgatgttgggagtaaattaacgtttgagagttataaatatgttttggtaatataattagatgggattggagaaattaaaaaatgagaaatatttttaaaaaagtaagattaagttgcgtgggaggttaaacgaggggggttttttgggttgtttttattatgataaaaatcgttattattttatattttttatatcgttaacgtttcgttaacgtttcgttaacgttttattatttttatgatattcgttcgcggtattgttttagcgaaggtatttttgtttgggttatgaggcgtaatcgttttttatagttggggtggtttttttaggttcgtatcgaggggaagttggggtatcggttttcgtcgttagtatttaagatggcggtacgagcgtcgtaattataagaattatatgtttcgtgtttcgttttagtattttcgggttttattagatttttgtaagttattgtgggaatttttaaggcgagggtgtttcgtattttggcggcgatatatttttttattttttgatttaggtttttattttttcgttatagaaagcgttggaagcgtttaatttggatattttatttaacgtttaagtttattaatatcgttcgtcgcgaaggcgcggtcgaggggtttagaatgttagatattagggttttcgttttttttattggtgggtttatatcgcggggcgggtttaggtatttattgggtcgggaattatgttagttttgggaaattaggttcggggatgaggaggtatatttagttattgggttttttttgttgttaattagagggatattcgtcgacggtttcggtttcggttcgttgattggagaaattgtttttagggtgtttgcggcgggcgggttttcgagtgcggtagtaggagggggcggggaggtaagcggaggtttcgagttttaggtcggtcggcggtggcggcggcgaggtcgggattcgggtttagggtttgttgtggaggtagcggcggacgtcgagttaagtagtgggtatcgggtatattttttttttagaagggagggttgtagcgtcgcggggtcgaggtttatggggcgacgggatggtgttgaggtgtaggaggcgggggtcgagcggggttttcgttagagttcggttttgggtttgatagggaggggtttcgcgcggggtcgagaggaaagttggtttcggggtgggatggattgggtagggttgagggtacgagaaggcgtggtgtgaggtttggatttgggagtggggtggggttatcgggacggagggcggggtggggtttgttgtaagggtgggttaaggttagggaagtagtatttgttcgttggtcgtttttggaggttagaagtttcggcgtcgagagtgggtatggcgatttggttttagtcggattcgggtattcgggtagggtgggattagttttaggttatgggttttgtatttatttgatttttaagggattttgttcggtttttcgaatttaattggttt

SEQ ID NO: 48 - DNA, 3001 bp, homo sapiens
ttagatagaatggaagatagtttttttgtttttatttttttttatggagtattaaatattttgggtgtttatattttgttaggtttaggtttgttgttgtgattgagtttgtttttatatttttattttttttggtttttgtaattttttttttttttttgtttatttttgtgaaatggttaagtaggaaattttatagataaatgattgtttagttttagtttgaattgttaggattgaaaattgttttgtatttttttgttaaaaaaagattaattttagtatgttttttttatttttttaaaattgttttgtagttaaatattgtagttgagtttttatattttttaattttatgttttgttttgttgaggaagtattttattgttgtttagattggtattattatagtttattgtagttttaattttttagtttaagaaatttttttattttagttttttgagtagttgggattatagatgtgtggtattaagtttagtttgtttttttgtagtgatgggggttttattatgttgtttaggttggttaagtaatttttttgttttggttttttaaggtgttattgtgagttattgtgttgggtttagttttatgtttaaaatattttttttttaattttatttatttttagagttgatggttatatttaaatatttttttttttttatataatattagtttttatttttattgttttattattttggggattgaatggttttttattttattgttaatatgttatattttttaaaattgtatattttttaaggtgtggttaatttttgtttttaataggaaaattagaggtttgtttgtttgagtttttttttaagtatttagtatttgagtgtttattaagttataatagttaatgtataaaattttagtttttatgttgtttatatttaggtatttattgggagatatgtgttagtagtttttgataaatggaaagattgtttgagtttaggagttttagtttagtttagaataggtaaaatatgttttttgaattagtttttgaaattggtaaattagtttagaagtttttttaagaattttatgagtggtttgttggtgtatgtttattatatgtagtgaaagtatttaatttgtaaattattttaaattaagtttttaatttgtaagtataaaatggatttgattatttattgagttattagttggttttgtttttagttgtatagggattaatgatttatttataaataatgggtttttttaagaagatatagttgagttgatatttttttgttttatagttgggaggaatgtattgtaaatgttaatttaatgattttttaaatggggtttttgtattagttgtgttaaaattattttagtaggtaggttatttggttgttattttagggttattaaattagattttttagtgggattttggaatttgtagtttagtaagttttttaagtgatgttgggagtaaattaatgtttgagagttataaatatgttttggtaatataattagatgggattggagaaattaaaaaatgagaaatatttttaaaaaagtaagattaagttgtgtgggaggttaaatgaggggggttttttgggttgtttttattatgataaaaattgttattattttatattttttatattgttaatgttttgttaatgttttgttaatgttttattatttttatgatatttgtttgtggtattgttttagtgaaggtatttttgtttgggttatgaggtgtaattgttttttatagttggggtggtttttttaggtttgtattgaggggaagttggggtattggtttttgttgttagtatttaagatggtggtatgagtgttgtaattataagaattatatgttttgtgttttgttttagtatttttgggttttattagatttttgtaagttattgtgggaatttttaaggtgagggtgttttgtattttggtggtgatatatttttttattttttgatttaggtttttatttttttgttatagaaagtgttggaagtgtttaatttggatattttatttaatgtttaagtttattaatattgtttgttgtgaaggtgtggttgaggggtttagaatgttagatattagggtttttgttttttttattggtgggtttatattgtggggtgggtttaggtatttattgggttgggaattatgttagttttgggaaattaggtttggggatgaggaggtatatttagttattgggttttttttgttgttaattagagggatatttgttgatggttttggttttggtttgttgattggagaaattgtttttagggtgtttgtggtgggtgggtttttgagtgtggtagtaggagggggtggggaggtaagtggaggttttgagttttaggttggttggtggtggtggtggtgaggttgggatttgggtttagggtttgttgtggaggtagtggtggatgttgagttaagtagtgggtattgggtatattttttttttagaagggagggttgtagtgttgtggggttgaggtttatggggtgatgggatggtgttgaggtgtaggaggtgggggttgagtggggtttttgttagagtttggttttgggtttgatagggaggggttttgtgtggggttgagaggaaagttggttttggggtgggatggattgggtagggttgagggtatgagaaggtgtggtgtgaggtttggatttgggagtggggtggggttattgggatggagggtggggtggggtttgttgtaagggtgggttaaggttagggaagtagtatttgtttgttggttgtttttggaggttagaagttttggtgttgagagtgggtatggtgatttggttttagttggatttgggtatttgggtagggtgggattagttttaggttatgggttttgtatttatttgatttttaagggattttgtttggttttttgaatttaattggttt

SEQ ID NO: 49 - DNA, 3001 bp, homo sapiens
gagttaattaagttcgaggaatcggataaagttttttaaaaattaagtaggtgtagggtttatagtttgaggttggttttattttgttcggatattcgagttcggttgagattaagtcgttatgtttattttcggcgtcggagtttttagtttttaggggcggttagcgaataagtgttatttttttggttttgatttatttttatagtaaattttatttcgtttttcgtttcgatggttttattttatttttaagtttaggttttatattacgttttttcgtgtttttaattttgtttagtttattttatttcggagttagtttttttttcggtttcgcgcggggtttttttttgttaggtttagggtcgggttttggcgggaatttcgttcggttttcgttttttgtattttagtattatttcgtcgttttataagtttcggtttcgcggcgttgtaatttttttttttgggaaaggaatgtgttcgatatttattgtttagttcggcgttcgtcgttgtttttatagtaggttttaagttcgagtttcggtttcgtcgtcgttatcgtcggtcggtttagagttcggagttttcgtttattttttcgtttttttttgttatcgtattcggaaattcgttcgtcgtaaatattttaggaatagtttttttaattaacgagtcgaggtcggggtcgtcgacggatgtttttttgattggtagtagagagggtttaatggttgagtgtatttttttattttcggatttgattttttaagattgatataattttcggtttaatgagtatttaggttcgtttcgcggtatggatttattaatgaggagggcgaaggttttagtgtttggtattttgggtttttcggtcgcgttttcgcggcgggcgatgttagtgggtttgggcgttgggtgaagtatttaggttgggcgtttttagcgttttttgtggcgggggaatgaaggtttaggttagggaataggaaggtgtatcgtcgttagagtgcggaatattttcgttttgagggtttttatagtgatttgtaaaagtttagtgagattcgagaatgttgaggcgggatacgaagtatgtggtttttgtggttgcgacgttcgtgtcgttattttgggtgttggcggcggaaatcggtattttaattttttttcggtgcgaatttggagaagttattttagttgtgagggacggttgcgttttatggtttaggtaagggtattttcgttggagtagtatcgcggacggatattatgagggtggtgggacgttggcggaacgttggcggaacgttggcggtgtgagaggtgtggggtaatggcgatttttgttatggtagaaatagtttaaaggatttttttcgtttggttttttacgtagtttagttttgtttttttagggatgttttttattttttaatttttttagttttatttggttatattgttaaaatatgtttgtgatttttaaacgttagtttatttttagtattatttggggagtttgttaagttacgaatttcgaggttttattggagagtttgatttaatgattttggagtggcggtcggataatttgtttgttggggtgattttaacgtagttgatgcgaagattttatttagggaattattgggttggcgtttgtaatgcgttttttttagttataggataaagaggtgttaatttaattgtgtttttttagaagagtttattatttataggtgagttattagtttttgtataattaaggataaggttaattgataatttagtaaataatcgagtttattttgtgtttgcgagttaggggtttaatttggggtggtttgtagattaagtatttttattgtatataataaacgtatattagtaaattatttatggaatttttaaaaaaatttttgagttagtttattagttttaaagattaatttagagagtatgttttatttattttaggttggattggaatttttggatttaagcgatttttttatttattagggattattgacgcgtgttttttaataaatatttgagtataaataatatgaggattagaattttgtgcgttaattgttataatttagtagatatttaaatattgagtatttgaagggggatttaagtaggtaggtttttgatttttttgttaaaagtagaaattaattatattttggaggatgtatagttttgaaggatatggtatgttaataataaaataggagattatttagttttcgaagtagtgagataatgaagataaagattggtattgtataagaaaggaggaatatttaggtgtggttattaattttaaaaataaataaggttgagaaggaagtattttaaatatagaattgggttcggcgtagtggtttatagtagtattttgggaggtcgaggcgggaggattgtttgattagtttgggtagtatagtgagattttcgtcgttataaaaaaataagttgggtttggtgttatatatttatagttttaattatttaggaggttgaggtgggaggattttttgagttgggagattgaggttgtagtgagttatgatggtgttagtttgggtaatagtgagatgtttttttaataaaataaaatataaaattgagagatataaaggtttaattatagtgtttaattataagataattttgagaaggtgaaaagagtatattaaagttggtttttttttgatagaaaaatatagaataatttttagttttaatagtttaaattaaaattggataatcgtttatttgtggagttttttgtttagttattttataaaggtgggtagaaaaagggaaagagttgtaagggtcgaagagagtaaaggtgtagagataaatttagtcgtaatagtaggtttaggtttggtagggtgtgggcgtttaggatatttgatgttttatggaagggagtggagatagaaagattgttttttattttgtttag

SEQ ID NO: 50 - DNA, 3001 bp, homo sapiens
gagttaattaagtttgaggaattggataaagttttttaaaaattaagtaggtgtagggtttatagtttgaggttggttttattttgtttggatatttgagtttggttgagattaagttgttatgtttatttttggtgttggagtttttagtttttaggggtggttagtgaataagtgttatttttttggttttgatttatttttatagtaaattttattttgttttttgttttgatggttttattttatttttaagtttaggttttatattatgtttttttgtgtttttaattttgtttagtttattttattttggagttagttttttttttggttttgtgtggggtttttttttgttaggtttagggttgggttttggtgggaattttgtttggtttttgttttttgtattttagtattattttgttgttttataagttttggttttgtggtgttgtaatttttttttttgggaaaggaatgtgtttgatatttattgtttagtttggtgtttgttgttgtttttatagtaggttttaagtttgagttttggttttgttgttgttattgttggttggtttagagtttggagtttttgtttatttttttgtttttttttgttattgtatttggaaatttgtttgttgtaaatattttaggaatagtttttttaattaatgagttgaggttggggttgttgatggatgtttttttgattggtagtagagagggtttaatggttgagtgtatttttttatttttggatttgattttttaagattgatataatttttggtttaatgagtatttaggtttgttttgtggtatggatttattaatgaggagggtgaaggttttagtgtttggtattttgggttttttggttgtgtttttgtggtgggtgatgttagtgggtttgggtgttgggtgaagtatttaggttgggtgtttttagtgttttttgtggtgggggaatgaaggtttaggttagggaataggaaggtgtattgttgttagagtgtggaatatttttgttttgagggtttttatagtgatttgtaaaagtttagtgagatttgagaatgttgaggtgggatatgaagtatgtggtttttgtggttgtgatgtttgtgttgttattttgggtgttggtggtggaaattggtattttaatttttttttggtgtgaatttggagaagttattttagttgtgagggatggttgtgttttatggtttaggtaagggtatttttgttggagtagtattgtggatggatattatgagggtggtgggatgttggtggaatgttggtggaatgttggtggtgtgagaggtgtggggtaatggtgatttttgttatggtagaaatagtttaaaggattttttttgtttggttttttatgtagtttagttttgtttttttagggatgttttttattttttaatttttttagttttatttggttatattgttaaaatatgtttgtgatttttaaatgttagtttatttttagtattatttggggagtttgttaagttatgaattttgaggttttattggagagtttgatttaatgattttggagtggtggttggataatttgtttgttggggtgattttaatgtagttgatgtgaagattttatttagggaattattgggttggtgtttgtaatgtgttttttttagttataggataaagaggtgttaatttaattgtgtttttttagaagagtttattatttataggtgagttattagtttttgtataattaaggataaggttaattgataatttagtaaataattgagtttattttgtgtttgtgagttaggggtttaatttggggtggtttgtagattaagtatttttattgtatataataaatgtatattagtaaattatttatggaatttttaaaaaaatttttgagttagtttattagttttaaagattaatttagagagtatgttttatttattttaggttggattggaatttttggatttaagtgatttttttatttattagggattattgatgtgtgttttttaataaatatttgagtataaataatatgaggattagaattttgtgtgttaattgttataatttagtagatatttaaatattgagtatttgaagggggatttaagtaggtaggtttttgatttttttgttaaaagtagaaattaattatattttggaggatgtatagttttgaaggatatggtatgttaataataaaataggagattatttagtttttgaagtagtgagataatgaagataaagattggtattgtataagaaaggaggaatatttaggtgtggttattaattttaaaaataaataaggttgagaaggaagtattttaaatatagaattgggtttggtgtagtggtttatagtagtattttgggaggttgaggtgggaggattgtttgattagtttgggtagtatagtgagatttttgttgttataaaaaaataagttgggtttggtgttatatatttatagttttaattatttaggaggttgaggtgggaggattttttgagttgggagattgaggttgtagtgagttatgatggtgttagtttgggtaatagtgagatgtttttttaataaaataaaatataaaattgagagatataaaggtttaattatagtgtttaattataagataattttgagaaggtgaaaagagtatattaaagttggtttttttttgatagaaaaatatagaataatttttagttttaatagtttaaattaaaattggataattgtttatttgtggagttttttgtttagttattttataaaggtgggtagaaaaagggaaagagttgtaagggttgaagagagtaaaggtgtagagataaatttagttgtaatagtaggtttaggtttggtagggtgtgggtgtttaggatatttgatgttttatggaagggagtggagatagaaagattgttttttattttgtttag

SEQ ID NO: 51 - DNA, 2550 bp, homo sapiens
gaggataggcccaggagggagcttgctttcctctgcagcttgagcacggagcatggggtgggagtcccatctcactgcagcctctgcggtgagctcagggtgggggcagctgggcgcctgagtggaactggggttgtgaggtgggagggggctgctcaaggatggaggaagggggctggctgggccgcccaggcagcagcacgggcggggcaccctcctcaggcccctcggagctagcaaggggccacccttccagcctggtgtgctccctgaaagccaagagctccttgcagccccctgtccggcttcccggcaccggctgccctggggctcatctcgcagaccatgacccgcctggaccgcagctctcacagtggtgggggccatgccaaaggcagccggccccttaactctttgctggctggtcaccgggtggcccagcccgcctctgctcctgggtccagggcttctgttcaggttggtgtatgtggggagactaaagtagtacgtctgggaggtcttagggtcagggggggttaatgggagaagaataccgacttagaggtagggaggagggtctgatctaaggaaattgctttctggaaagtgtatgtctgcattttaacccctggatggaaggcaacactttagggtttcttcaggcttgtagggagggctcgactacaggggggtgccatgtataggaagcccaaatagctctatttattggggttatatgctgttagtgggggtggcagttggtgcagcaactgttcacgagccaccagggtagagcgggagggaagcatttttggtgcccaaggtggcagttgtagctgagcagtgatggggtttatgtccttgagggggttgactgatggggatttggtgagtcctggggtatggtgagggaatgagagcactggtgtaggggacacagtgaggctggcccgagcagggggtggggtgcacccctggggatcatctgactgcctgagcctccctggaatggaggcagcagctaggatcagctgagagggaattctggcggggatgagtcttgaggtgagcctgggcttgaggagttgtgggtgttcagccttactcttgctgccagctggggaatggggaatggctataggaagggctggagacagcatggcgttgtcattggttgcatcaggtggttggaaatgcagggattttcctctctagcccaccccacccctttatgcaaatgaaatggtaccacaggctgatgcaagcctggccactgctaagtaattctgcatgacaattcgctcttgcttgccatggccagcttcctccaaaccaagttttaaggggtccaatccccaaagctagaggtgtctcctgatgttccccttctttcttatgtaggggggaggcggccctgccttttgtctgggtgtgtcttggtccagatcctaatcctttgcacccttatggtgatagtcacactaatggttttgctagtggctctttttttttgtgggaaggggatagtgtctggaagtagatgaatgaacacttgctggtgcagggaccagggggtaaaggctggcaggtgaagagctgggaggggccccacccaggactaactggggtgacactaggagggaactctgaggggcaggacaaggaagggaccttgggatcttagagctaaagtcatgtgatctgtctttcaggacatagatctgattgacatcctttggcgacaggatattgatctgggggctgggcgtgaggtttttgactatagtcaccgccagaaggagcaggatgtggagaaggagctgcgagatggaggcgagcaggacacctgggcaggcgagggcgcggaagctctggcacggaacctgctagtggatggagagactggggagagcttccctgcacaggtaccatcgcccctgctcactgggctctcttcttgtccctactaccctgacacaaaccaggctggagttcttccagaaacttcctttagagaagacaggtggtgtgtggggtggacctgaatttctgttttgggttggggtctgtaagtcacagtggctgagccttggaaggggggagtggaaagcagcagatgcagaatggccaggccgtggcaacagacagtgcaagggaggcagagcatgtagcatcttcctgcttgcttcaggactctttcactctcttctgttgtttctgggagtttgggactcggggccagccattagcctgggaatgggagggagactgcagggcttcagccattctgggaaagaagcttcagccccaggcagccaaggcccaggtcaatcagacttacagttcctgttgccacaggtgcctagtggggaggaccagacggccctgtccctggaagagtgccttaggctgctggaagccacctgcccctttggggagaatgctgaggtgagcaggactccagtgagagtccaccaagtgagcagggcagcctgtacctggtgtgtccctccatggctgaggggccagctgttggttctggccttattc

SEQ ID NO: 52 - DNA, 2550 bp, homo sapiens
gaggataggtttaggagggagtttgtttttttttgtagtttgagtacggagtatggggtgggagttttattttattgtagtttttgcggtgagtttagggtgggggtagttgggcgtttgagtggaattggggttgtgaggtgggagggggttgtttaaggatggaggaagggggttggttgggtcgtttaggtagtagtacgggcggggtattttttttaggtttttcggagttagtaaggggttatttttttagtttggtgtgttttttgaaagttaagagttttttgtagttttttgttcggtttttcggtatcggttgttttggggtttatttcgtagattatgattcgtttggatcgtagtttttatagtggtgggggttatgttaaaggtagtcggttttttaattttttgttggttggttatcgggtggtttagttcgtttttgtttttgggtttagggtttttgtttaggttggtgtatgtggggagattaaagtagtacgtttgggaggttttagggttagggggggttaatgggagaagaatatcgatttagaggtagggaggagggtttgatttaaggaaattgttttttggaaagtgtatgtttgtattttaatttttggatggaaggtaatattttagggtttttttaggtttgtagggagggttcgattataggggggtgttatgtataggaagtttaaatagttttatttattggggttatatgttgttagtgggggtggtagttggtgtagtaattgtttacgagttattagggtagagcgggagggaagtatttttggtgtttaaggtggtagttgtagttgagtagtgatggggtttatgtttttgagggggttgattgatggggatttggtgagttttggggtatggtgagggaatgagagtattggtgtaggggatatagtgaggttggttcgagtagggggtggggtgtatttttggggattatttgattgtttgagtttttttggaatggaggtagtagttaggattagttgagagggaattttggcggggatgagttttgaggtgagtttgggtttgaggagttgtgggtgtttagttttatttttgttgttagttggggaatggggaatggttataggaagggttggagatagtatggcgttgttattggttgtattaggtggttggaaatgtagggatttttttttttagtttattttatttttttatgtaaatgaaatggtattataggttgatgtaagtttggttattgttaagtaattttgtatgataattcgtttttgtttgttatggttagttttttttaaattaagttttaaggggtttaatttttaaagttagaggtgttttttgatgtttttttttttttttatgtaggggggaggcggttttgttttttgtttgggtgtgttttggtttagattttaattttttgtatttttatggtgatagttatattaatggttttgttagtggttttttttttttgtgggaaggggatagtgtttggaagtagatgaatgaatatttgttggtgtagggattagggggtaaaggttggtaggtgaagagttgggaggggttttatttaggattaattggggtgatattaggagggaattttgaggggtaggataaggaagggattttgggattttagagttaaagttatgtgatttgttttttaggatatagatttgattgatattttttggcgataggatattgatttgggggttgggcgtgaggtttttgattatagttatcgttagaaggagtaggatgtggagaaggagttgcgagatggaggcgagtaggatatttgggtaggcgagggcgcggaagttttggtacggaatttgttagtggatggagagattggggagagtttttttgtataggtattatcgtttttgtttattgggttttttttttgtttttattattttgatataaattaggttggagtttttttagaaattttttttagagaagataggtggtgtgtggggtggatttgaatttttgttttgggttggggtttgtaagttatagtggttgagttttggaaggggggagtggaaagtagtagatgtagaatggttaggtcgtggtaatagatagtgtaagggaggtagagtatgtagtatttttttgtttgttttaggatttttttatttttttttgttgtttttgggagtttgggattcggggttagttattagtttgggaatgggagggagattgtagggttttagttattttgggaaagaagttttagttttaggtagttaaggtttaggttaattagatttatagtttttgttgttataggtgtttagtggggaggattagacggttttgtttttggaagagtgttttaggttgttggaagttatttgtttttttggggagaatgttgaggtgagtaggattttagtgagagtttattaagtgagtagggtagtttgtatttggtgtgtttttttatggttgaggggttagttgttggttttggttttattt

SEQ ID NO: 53 - DNA, 2550 bp, homo sapiens
gaggataggtttaggagggagtttgtttttttttgtagtttgagtatggagtatggggtgggagttttattttattgtagtttttgtggtgagtttagggtgggggtagttgggtgtttgagtggaattggggttgtgaggtgggagggggttgtttaaggatggaggaagggggttggttgggttgtttaggtagtagtatgggtggggtattttttttaggttttttggagttagtaaggggttatttttttagtttggtgtgttttttgaaagttaagagttttttgtagttttttgtttggttttttggtattggttgttttggggtttattttgtagattatgatttgtttggattgtagtttttatagtggtgggggttatgttaaaggtagttggttttttaattttttgttggttggttattgggtggtttagtttgtttttgtttttgggtttagggtttttgtttaggttggtgtatgtggggagattaaagtagtatgtttgggaggttttagggttagggggggttaatgggagaagaatattgatttagaggtagggaggagggtttgatttaaggaaattgttttttggaaagtgtatgtttgtattttaatttttggatggaaggtaatattttagggtttttttaggtttgtagggagggtttgattataggggggtgttatgtataggaagtttaaatagttttatttattggggttatatgttgttagtgggggtggtagttggtgtagtaattgtttatgagttattagggtagagtgggagggaagtatttttggtgtttaaggtggtagttgtagttgagtagtgatggggtttatgtttttgagggggttgattgatggggatttggtgagttttggggtatggtgagggaatgagagtattggtgtaggggatatagtgaggttggtttgagtagggggtggggtgtatttttggggattatttgattgtttgagtttttttggaatggaggtagtagttaggattagttgagagggaattttggtggggatgagttttgaggtgagtttgggtttgaggagttgtgggtgtttagttttatttttgttgttagttggggaatggggaatggttataggaagggttggagatagtatggtgttgttattggttgtattaggtggttggaaatgtagggatttttttttttagtttattttatttttttatgtaaatgaaatggtattataggttgatgtaagtttggttattgttaagtaattttgtatgataatttgtttttgtttgttatggttagttttttttaaattaagttttaaggggtttaatttttaaagttagaggtgttttttgatgtttttttttttttttatgtaggggggaggtggttttgttttttgtttgggtgtgttttggtttagattttaattttttgtatttttatggtgatagttatattaatggttttgttagtggttttttttttttgtgggaaggggatagtgtttggaagtagatgaatgaatatttgttggtgtagggattagggggtaaaggttggtaggtgaagagttgggaggggttttatttaggattaattggggtgatattaggagggaattttgaggggtaggataaggaagggattttgggattttagagttaaagttatgtgatttgttttttaggatatagatttgattgatattttttggtgataggatattgatttgggggttgggtgtgaggtttttgattatagttattgttagaaggagtaggatgtggagaaggagttgtgagatggaggtgagtaggatatttgggtaggtgagggtgtggaagttttggtatggaatttgttagtggatggagagattggggagagtttttttgtataggtattattgtttttgtttattgggttttttttttgtttttattattttgatataaattaggttggagtttttttagaaattttttttagagaagataggtggtgtgtggggtggatttgaatttttgttttgggttggggtttgtaagttatagtggttgagttttggaaggggggagtggaaagtagtagatgtagaatggttaggttgtggtaatagatagtgtaagggaggtagagtatgtagtatttttttgtttgttttaggatttttttatttttttttgttgtttttgggagtttgggatttggggttagttattagtttgggaatgggagggagattgtagggttttagttattttgggaaagaagttttagttttaggtagttaaggtttaggttaattagatttatagtttttgttgttataggtgtttagtggggaggattagatggttttgtttttggaagagtgttttaggttgttggaagttatttgtttttttggggagaatgttgaggtgagtaggattttagtgagagtttattaagtgagtagggtagtttgtatttggtgtgtttttttatggttgaggggttagttgttggttttggttttattt

SEQ ID NO: 54 - DNA, 2550 bp, homo sapiens
gaataaggttagaattaatagttggttttttagttatggagggatatattaggtataggttgttttgtttatttggtggatttttattggagttttgtttattttagtattttttttaaaggggtaggtggtttttagtagtttaaggtatttttttagggatagggtcgtttggttttttttattaggtatttgtggtaataggaattgtaagtttgattgatttgggttttggttgtttggggttgaagttttttttttagaatggttgaagttttgtagttttttttttatttttaggttaatggttggtttcgagttttaaatttttagaaataatagaagagagtgaaagagttttgaagtaagtaggaagatgttatatgttttgttttttttgtattgtttgttgttacggtttggttattttgtatttgttgttttttattttttttttttaaggtttagttattgtgatttatagattttaatttaaaatagaaatttaggtttattttatatattatttgttttttttaaaggaagtttttggaagaattttagtttggtttgtgttagggtagtagggataagaagagagtttagtgagtaggggcgatggtatttgtgtagggaagttttttttagtttttttatttattagtaggtttcgtgttagagttttcgcgttttcgtttgtttaggtgttttgttcgtttttatttcgtagttttttttttatattttgttttttttggcggtgattatagttaaaaattttacgtttagtttttagattaatattttgtcgttaaaggatgttaattagatttatgttttgaaagatagattatatgattttagttttaagattttaaggttttttttttgttttgttttttagagtttttttttagtgttattttagttagttttgggtggggttttttttagttttttatttgttagtttttattttttggtttttgtattagtaagtgtttatttatttatttttagatattattttttttttataaaaaaaaagagttattagtaaaattattagtgtgattattattataagggtgtaaaggattaggatttggattaagatatatttagataaaaggtagggtcgttttttttttatataagaaagaaggggaatattaggagatatttttagttttggggattggattttttaaaatttggtttggaggaagttggttatggtaagtaagagcgaattgttatgtagaattatttagtagtggttaggtttgtattagtttgtggtattattttatttgtataaaggggtggggtgggttagagaggaaaatttttgtatttttaattatttgatgtaattaatgataacgttatgttgtttttagttttttttatagttattttttattttttagttggtagtaagagtaaggttgaatatttataattttttaagtttaggtttattttaagatttattttcgttagaatttttttttagttgattttagttgttgtttttattttagggaggtttaggtagttagatgatttttaggggtgtattttattttttgttcgggttagttttattgtgttttttatattagtgtttttatttttttattatattttaggatttattaaatttttattagttaatttttttaaggatataaattttattattgtttagttataattgttattttgggtattaaaaatgtttttttttcgttttattttggtggttcgtgaatagttgttgtattaattgttatttttattaatagtatataattttaataaatagagttatttgggttttttatatatggtatttttttgtagtcgagttttttttataagtttgaagaaattttaaagtgttgttttttatttaggggttaaaatgtagatatatattttttagaaagtaatttttttagattagatttttttttttatttttaagtcggtattttttttttattaattttttttgattttaagattttttagacgtattattttagtttttttatatatattaatttgaatagaagttttggatttaggagtagaggcgggttgggttattcggtgattagttagtaaagagttaaggggtcggttgtttttggtatggtttttattattgtgagagttgcggtttaggcgggttatggtttgcgagatgagttttagggtagtcggtgtcgggaagtcggatagggggttgtaaggagtttttggtttttagggagtatattaggttggaagggtggttttttgttagtttcgaggggtttgaggagggtgtttcgttcgtgttgttgtttgggcggtttagttagttttttttttttatttttgagtagtttttttttattttataattttagttttatttaggcgtttagttgtttttattttgagtttatcgtagaggttgtagtgagatgggatttttattttatgtttcgtgtttaagttgtagaggaaagtaagtttttttttgggtttattttt

SEQ ID NO: 55 - DNA, 2550 bp, homo sapiens
gaataaggttagaattaatagttggttttttagttatggagggatatattaggtataggttgttttgtttatttggtggatttttattggagttttgtttattttagtattttttttaaaggggtaggtggtttttagtagtttaaggtatttttttagggatagggttgtttggttttttttattaggtatttgtggtaataggaattgtaagtttgattgatttgggttttggttgtttggggttgaagttttttttttagaatggttgaagttttgtagttttttttttatttttaggttaatggttggttttgagttttaaatttttagaaataatagaagagagtgaaagagttttgaagtaagtaggaagatgttatatgttttgttttttttgtattgtttgttgttatggtttggttattttgtatttgttgttttttattttttttttttaaggtttagttattgtgatttatagattttaatttaaaatagaaatttaggtttattttatatattatttgttttttttaaaggaagtttttggaagaattttagtttggtttgtgttagggtagtagggataagaagagagtttagtgagtaggggtgatggtatttgtgtagggaagttttttttagtttttttatttattagtaggttttgtgttagagtttttgtgtttttgtttgtttaggtgttttgtttgtttttattttgtagttttttttttatattttgttttttttggtggtgattatagttaaaaattttatgtttagtttttagattaatattttgttgttaaaggatgttaattagatttatgttttgaaagatagattatatgattttagttttaagattttaaggttttttttttgttttgttttttagagtttttttttagtgttattttagttagttttgggtggggttttttttagttttttatttgttagtttttattttttggtttttgtattagtaagtgtttatttatttatttttagatattattttttttttataaaaaaaaagagttattagtaaaattattagtgtgattattattataagggtgtaaaggattaggatttggattaagatatatttagataaaaggtagggttgttttttttttatataagaaagaaggggaatattaggagatatttttagttttggggattggattttttaaaatttggtttggaggaagttggttatggtaagtaagagtgaattgttatgtagaattatttagtagtggttaggtttgtattagtttgtggtattattttatttgtataaaggggtggggtgggttagagaggaaaatttttgtatttttaattatttgatgtaattaatgataatgttatgttgtttttagttttttttatagttattttttattttttagttggtagtaagagtaaggttgaatatttataattttttaagtttaggtttattttaagatttatttttgttagaatttttttttagttgattttagttgttgtttttattttagggaggtttaggtagttagatgatttttaggggtgtattttattttttgtttgggttagttttattgtgttttttatattagtgtttttatttttttattatattttaggatttattaaatttttattagttaatttttttaaggatataaattttattattgtttagttataattgttattttgggtattaaaaatgttttttttttgttttattttggtggtttgtgaatagttgttgtattaattgttatttttattaatagtatataattttaataaatagagttatttgggttttttatatatggtatttttttgtagttgagttttttttataagtttgaagaaattttaaagtgttgttttttatttaggggttaaaatgtagatatatattttttagaaagtaatttttttagattagatttttttttttatttttaagttggtattttttttttattaattttttttgattttaagattttttagatgtattattttagtttttttatatatattaatttgaatagaagttttggatttaggagtagaggtgggttgggttatttggtgattagttagtaaagagttaaggggttggttgtttttggtatggtttttattattgtgagagttgtggtttaggtgggttatggtttgtgagatgagttttagggtagttggtgttgggaagttggatagggggttgtaaggagtttttggtttttagggagtatattaggttggaagggtggttttttgttagttttgaggggtttgaggagggtgttttgtttgtgttgttgtttgggtggtttagttagttttttttttttatttttgagtagtttttttttattttataattttagttttatttaggtgtttagttgtttttattttgagtttattgtagaggttgtagtgagatgggatttttattttatgttttgtgtttaagttgtagaggaaagtaagtttttttttgggtttattttt

SEQ ID NO: 56 - DNA, 50 bp, homo sapiens
gggcctgctgtggaggcagcggcggacgccgagctaagcagtgggtatcg

SEQ ID NO: 57 - DNA, 50 bp, homo sapiens
gggtttgttgtggaggtagcggcggacgtcgagttaagtagtgggtatcg

SEQ ID NO: 58 - DNA, 50 bp, homo sapiens
gggtttgttgtggaggtagtggtggatgttgagttaagtagtgggtattg

SEQ ID NO: 59 - DNA, 50 bp, homo sapiens
cgatatttattgtttagttcggcgttcgtcgttgtttttatagtaggttt

SEQ ID NO: 60 - DNA, 50 bp, homo sapiens
tgatatttattgtttagtttggtgtttgttgttgtttttatagtaggttt

SEQ ID NO: 61 - DNA, 3001 bp, homo sapiens
ctagaataggtaaaacatgctctctgaattagtctttgaaactggtaaactagctcagaagtttttttaagaattccatgagtggtttgctggtgtacgtttattatatgcagtgaaagtacttaatctgcaaaccaccccaaattaagcccctaactcgcaagcacaaaatggactcgattatttactgagttatcagttggccttgtccttagttgtacagggactaatgactcacctataaataatgggctcttctaagaagacacagttgagttgacacctctttgtcctatagctgggaggaacgcattgcaaacgccaacccaatgattccctaaatggggtcttcgcatcagctgcgttaaaatcaccccagcaggcaggttatccggccgccactccagggtcattaaatcagactctccagtgggacctcggaattcgtagcttagcaagctccccaagtgatgctgggagtaaactaacgtttgagagtcacaaacatgttttggcaatataaccagatgggactggagaaattaaaaaatgagaaacatccctaaaaaagcaagactaagctgcgtgggaggccaaacgaggggggtcctttgggctgtttctaccatgacaaaaatcgccattaccccacacctctcacaccgccaacgttccgccaacgttccgccaacgtcccaccaccctcatgatatccgtccgcggtactgctccagcgaaggtacccttgcctgggccatgaggcgcaaccgtccctcacagctggggtggcttctccaggttcgcaccgaggggaagttggggtaccggtttccgccgccagcacccaagatggcggcacgagcgtcgcaaccacaagaaccacatgcttcgtgtcccgcctcagcattctcgggtctcactagacttttgcaagtcactgtgggaaccctcaaggcgagggtgttccgcactctggcggcgatacaccttcctattccctgacctaggccttcattcccccgccacagaaagcgctggaagcgcccaacctggatacttcacccaacgcccaagcccactaacatcgcccgccgcgaaggcgcggccgaggggcccagaatgccagacactagggccttcgccctcctcattggtgggtccataccgcggggcgggcctaggtactcattgggccgggaattatgtcagtcttgggaaatcaggtccggggatgaggaggtacactcagccattgggccctctctgctgccaatcagagggacatccgtcgacggccccggcctcggctcgttgattggagaaactgttcctagggtgtttgcggcgggcgggtttccgagtgcggtagcaggagggggcggggaggtaagcggaggctccgagctctaggccggccggcggtggcggcggcgaggccgggactcgggcttagggcctgctgtggaggcagcggcggacgccgagctaagcagtgggtatcgggcacattcctttcccagaagggagggttgcagcgccgcggggccgaggcttatggggcgacgggatggtgctgaggtgcaggaggcgggggccgagcggggttcccgccagagcccggccctgggcctgacagggaggggccccgcgcggggccgagaggaaagctggctccggggtgggatggactgggcagggttgagggcacgagaaggcgtggtgtgaggcctggacttgggagtggggtggggccatcgggacggagggcggggtggggtttgctgtaagggtgggtcaaggccagggaagtagcacttgttcgctggccgcccctggaggctagaagctccggcgccgagagtgggcatggcgacttggtctcagccggactcgggtatccgggcagggtgggaccagcctcaggctatgggccctgcacctacttgatttttaagggactttgtccggttcctcgaacttaattggctcctgggaggttttagtaataaattgcgtgagaacgggagggtagcgtaagcaggaattctgggtcgcaattgtgtttactctgaccagagagagggagtgtgagtgtgtgtgtgtgcgcacgttcgtgtgtgtacgtatagctcgctctccccctgtagaatgaagttggtagatgggtcacaacgcaggagaggagaggcggtatgtcttggtttgtgacattaatggaagctcaaaagtggagaccagaaacagatttacttcctctgcactgggcagtctggctagagaacgtggccatatccttctgctttggctcagaaggtcatatgaatgaaaataaaacctgcctatgcaaattctggacggaatagtcctgcgtagtagggcccccaccatccctctcctttttttctttccttttcttttctttcttttttttctttttttgagacggagttttgctcttgttgcccaggctggagtgcagtggcgcgatatcggcccaccacaacctccgtttcctgggttcaagcgattctcctgtctcagcctcccgagtagctgggattacaggcatgcgccaccacgcccggctaatttttgtatttttagttgagatggggtttctccatgttgttcaggctggtctcaaactcccgacctcgggtgatccgccctcctcggcctcccgaagtgctgggattacaggcgtcggcccttttccttttttttcttttgtaagttgtgaggataggaaagggaaatcagatttcaaagttcagaaaacaaaaggcattcttcttctgggtgaagtggtggcctgaacattgtccttttgtccttccacactctcactgtttaataatcttgcctttttgaactgagaaaagacaactgttatgggtggttttctcccgaggggtgaaaatccagctttacttttaagacaggaaatgggcttctcatgtgaaaatagaagctgggtaatgcgcctgtagtgggggaggag

SEQ ID NO: 62 - DNA, 3001 bp, homo sapiens
ttagaataggtaaaatatgttttttgaattagtttttgaaattggtaaattagtttagaagtttttttaagaattttatgagtggtttgttggtgtacgtttattatatgtagtgaaagtatttaatttgtaaattattttaaattaagtttttaattcgtaagtataaaatggattcgattatttattgagttattagttggttttgtttttagttgtatagggattaatgatttatttataaataatgggtttttttaagaagatatagttgagttgatatttttttgttttatagttgggaggaacgtattgtaaacgttaatttaatgattttttaaatggggttttcgtattagttgcgttaaaattattttagtaggtaggttattcggtcgttattttagggttattaaattagattttttagtgggatttcggaattcgtagtttagtaagttttttaagtgatgttgggagtaaattaacgtttgagagttataaatatgttttggtaatataattagatgggattggagaaattaaaaaatgagaaatatttttaaaaaagtaagattaagttgcgtgggaggttaaacgaggggggttttttgggttgtttttattatgataaaaatcgttattattttatattttttatatcgttaacgtttcgttaacgtttcgttaacgttttattatttttatgatattcgttcgcggtattgttttagcgaaggtatttttgtttgggttatgaggcgtaatcgttttttatagttggggtggtttttttaggttcgtatcgaggggaagttggggtatcggttttcgtcgttagtatttaagatggcggtacgagcgtcgtaattataagaattatatgtttcgtgtttcgttttagtattttcgggttttattagatttttgtaagttattgtgggaatttttaaggcgagggtgtttcgtattttggcggcgatatatttttttattttttgatttaggtttttattttttcgttatagaaagcgttggaagcgtttaatttggatattttatttaacgtttaagtttattaatatcgttcgtcgcgaaggcgcggtcgaggggtttagaatgttagatattagggttttcgttttttttattggtgggtttatatcgcggggcgggtttaggtatttattgggtcgggaattatgttagttttgggaaattaggttcggggatgaggaggtatatttagttattgggttttttttgttgttaattagagggatattcgtcgacggtttcggtttcggttcgttgattggagaaattgtttttagggtgtttgcggcgggcgggttttcgagtgcggtagtaggagggggcggggaggtaagcggaggtttcgagttttaggtcggtcggcggtggcggcggcgaggtcgggattcgggtttagggtttgttgtggaggtagcggcggacgtcgagttaagtagtgggtatcgggtatattttttttttagaagggagggttgtagcgtcgcggggtcgaggtttatggggcgacgggatggtgttgaggtgtaggaggcgggggtcgagcggggttttcgttagagttcggttttgggtttgatagggaggggtttcgcgcggggtcgagaggaaagttggtttcggggtgggatggattgggtagggttgagggtacgagaaggcgtggtgtgaggtttggatttgggagtggggtggggttatcgggacggagggcggggtggggtttgttgtaagggtgggttaaggttagggaagtagtatttgttcgttggtcgtttttggaggttagaagtttcggcgtcgagagtgggtatggcgatttggttttagtcggattcgggtattcgggtagggtgggattagttttaggttatgggttttgtatttatttgatttttaagggattttgttcggtttttcgaatttaattggtttttgggaggttttagtaataaattgcgtgagaacgggagggtagcgtaagtaggaattttgggtcgtaattgtgtttattttgattagagagagggagtgtgagtgtgtgtgtgtgcgtacgttcgtgtgtgtacgtatagttcgttttttttttgtagaatgaagttggtagatgggttataacgtaggagaggagaggcggtatgttttggtttgtgatattaatggaagtttaaaagtggagattagaaatagatttattttttttgtattgggtagtttggttagagaacgtggttatatttttttgttttggtttagaaggttatatgaatgaaaataaaatttgtttatgtaaattttggacggaatagttttgcgtagtagggtttttattattttttttttttttttttttttttttttttttttttttttttttttttttttgagacggagttttgtttttgttgtttaggttggagtgtagtggcgcgatatcggtttattataattttcgttttttgggtttaagcgatttttttgttttagtttttcgagtagttgggattataggtatgcgttattacgttcggttaatttttgtatttttagttgagatggggtttttttatgttgtttaggttggttttaaattttcgatttcgggtgattcgtttttttcggtttttcgaagtgttgggattataggcgtcggttttttttttttttttttttttgtaagttgtgaggataggaaagggaaattagattttaaagtttagaaaataaaaggtattttttttttgggtgaagtggtggtttgaatattgtttttttgtttttttatatttttattgtttaataattttgtttttttgaattgagaaaagataattgttatgggtggttttttttcgaggggtgaaaatttagttttatttttaagataggaaatgggttttttatgtgaaaatagaagttgggtaatgcgtttgtagtgggggaggag

SEQ ID NO: 63 - DNA, 3001 bp, homo sapiens
ttagaataggtaaaatatgttttttgaattagtttttgaaattggtaaattagtttagaagtttttttaagaattttatgagtggtttgttggtgtatgtttattatatgtagtgaaagtatttaatttgtaaattattttaaattaagtttttaatttgtaagtataaaatggatttgattatttattgagttattagttggttttgtttttagttgtatagggattaatgatttatttataaataatgggtttttttaagaagatatagttgagttgatatttttttgttttatagttgggaggaatgtattgtaaatgttaatttaatgattttttaaatggggtttttgtattagttgtgttaaaattattttagtaggtaggttatttggttgttattttagggttattaaattagattttttagtgggattttggaatttgtagtttagtaagttttttaagtgatgttgggagtaaattaatgtttgagagttataaatatgttttggtaatataattagatgggattggagaaattaaaaaatgagaaatatttttaaaaaagtaagattaagttgtgtgggaggttaaatgaggggggttttttgggttgtttttattatgataaaaattgttattattttatattttttatattgttaatgttttgttaatgttttgttaatgttttattatttttatgatatttgtttgtggtattgttttagtgaaggtatttttgtttgggttatgaggtgtaattgttttttatagttggggtggtttttttaggtttgtattgaggggaagttggggtattggtttttgttgttagtatttaagatggtggtatgagtgttgtaattataagaattatatgttttgtgttttgttttagtatttttgggttttattagatttttgtaagttattgtgggaatttttaaggtgagggtgttttgtattttggtggtgatatatttttttattttttgatttaggtttttatttttttgttatagaaagtgttggaagtgtttaatttggatattttatttaatgtttaagtttattaatattgtttgttgtgaaggtgtggttgaggggtttagaatgttagatattagggtttttgttttttttattggtgggtttatattgtggggtgggtttaggtatttattgggttgggaattatgttagttttgggaaattaggtttggggatgaggaggtatatttagttattgggttttttttgttgttaattagagggatatttgttgatggttttggttttggtttgttgattggagaaattgtttttagggtgtttgtggtgggtgggtttttgagtgtggtagtaggagggggtggggaggtaagtggaggttttgagttttaggttggttggtggtggtggtggtgaggttgggatttgggtttagggtttgttgtggaggtagtggtggatgttgagttaagtagtgggtattgggtatattttttttttagaagggagggttgtagtgttgtggggttgaggtttatggggtgatgggatggtgttgaggtgtaggaggtgggggttgagtggggtttttgttagagtttggttttgggtttgatagggaggggttttgtgtggggttgagaggaaagttggttttggggtgggatggattgggtagggttgagggtatgagaaggtgtggtgtgaggtttggatttgggagtggggtggggttattgggatggagggtggggtggggtttgttgtaagggtgggttaaggttagggaagtagtatttgtttgttggttgtttttggaggttagaagttttggtgttgagagtgggtatggtgatttggttttagttggatttgggtatttgggtagggtgggattagttttaggttatgggttttgtatttatttgatttttaagggattttgtttggttttttgaatttaattggtttttgggaggttttagtaataaattgtgtgagaatgggagggtagtgtaagtaggaattttgggttgtaattgtgtttattttgattagagagagggagtgtgagtgtgtgtgtgtgtgtatgtttgtgtgtgtatgtatagtttgttttttttttgtagaatgaagttggtagatgggttataatgtaggagaggagaggtggtatgttttggtttgtgatattaatggaagtttaaaagtggagattagaaatagatttattttttttgtattgggtagtttggttagagaatgtggttatatttttttgttttggtttagaaggttatatgaatgaaaataaaatttgtttatgtaaattttggatggaatagttttgtgtagtagggtttttattattttttttttttttttttttttttttttttttttttttttttttttttttttgagatggagttttgtttttgttgtttaggttggagtgtagtggtgtgatattggtttattataatttttgttttttgggtttaagtgatttttttgttttagttttttgagtagttgggattataggtatgtgttattatgtttggttaatttttgtatttttagttgagatggggtttttttatgttgtttaggttggttttaaatttttgattttgggtgatttgttttttttggttttttgaagtgttgggattataggtgttggttttttttttttttttttttttgtaagttgtgaggataggaaagggaaattagattttaaagtttagaaaataaaaggtattttttttttgggtgaagtggtggtttgaatattgtttttttgtttttttatatttttattgtttaataattttgtttttttgaattgagaaaagataattgttatgggtggtttttttttgaggggtgaaaatttagttttatttttaagataggaaatgggttttttatgtgaaaatagaagttgggtaatgtgtttgtagtgggggaggag

SEQ ID NO: 64 - DNA, 3001 bp, homo sapiens
ttttttttttattataggcgtattatttagtttttatttttatatgagaagtttattttttgttttaaaagtaaagttggatttttatttttcgggagaaaattatttataatagttgtttttttttagtttaaaaaggtaagattattaaatagtgagagtgtggaaggataaaaggataatgtttaggttattattttatttagaagaagaatgttttttgttttttgaattttgaaatttgattttttttttttatttttataatttataaaagaaaaaaaaggaaaagggtcgacgtttgtaattttagtatttcgggaggtcgaggagggcggattattcgaggtcgggagtttgagattagtttgaataatatggagaaattttattttaattaaaaatataaaaattagtcgggcgtggtggcgtatgtttgtaattttagttattcgggaggttgagataggagaatcgtttgaatttaggaaacggaggttgtggtgggtcgatatcgcgttattgtattttagtttgggtaataagagtaaaatttcgttttaaaaaaagaaaaaaaagaaagaaaagaaaaggaaagaaaaaaaggagagggatggtgggggttttattacgtaggattatttcgtttagaatttgtataggtaggttttatttttatttatatgattttttgagttaaagtagaaggatatggttacgttttttagttagattgtttagtgtagaggaagtaaatttgtttttggtttttatttttgagtttttattaatgttataaattaagatatatcgtttttttttttttgcgttgtgatttatttattaattttattttatagggggagagcgagttatacgtatatatacgaacgtgcgtatatatatatatttatattttttttttttggttagagtaaatataattgcgatttagaatttttgtttacgttattttttcgtttttacgtaatttattattaaaattttttaggagttaattaagttcgaggaatcggataaagttttttaaaaattaagtaggtgtagggtttatagtttgaggttggttttattttgttcggatattcgagttcggttgagattaagtcgttatgtttattttcggcgtcggagtttttagtttttaggggcggttagcgaataagtgttatttttttggttttgatttatttttatagtaaattttatttcgtttttcgtttcgatggttttattttatttttaagtttaggttttatattacgttttttcgtgtttttaattttgtttagtttattttatttcggagttagtttttttttcggtttcgcgcggggtttttttttgttaggtttagggtcgggttttggcgggaatttcgttcggttttcgttttttgtattttagtattatttcgtcgttttataagtttcggtttcgcggcgttgtaatttttttttttgggaaaggaatgtgttcgatatttattgtttagttcggcgttcgtcgttgtttttatagtaggttttaagttcgagtttcggtttcgtcgtcgttatcgtcggtcggtttagagttcggagttttcgtttattttttcgtttttttttgttatcgtattcggaaattcgttcgtcgtaaatattttaggaatagtttttttaattaacgagtcgaggtcggggtcgtcgacggatgtttttttgattggtagtagagagggtttaatggttgagtgtatttttttattttcggatttgattttttaagattgatataattttcggtttaatgagtatttaggttcgtttcgcggtatggatttattaatgaggagggcgaaggttttagtgtttggtattttgggtttttcggtcgcgttttcgcggcgggcgatgttagtgggtttgggcgttgggtgaagtatttaggttgggcgtttttagcgttttttgtggcgggggaatgaaggtttaggttagggaataggaaggtgtatcgtcgttagagtgcggaatattttcgttttgagggtttttatagtgatttgtaaaagtttagtgagattcgagaatgttgaggcgggatacgaagtatgtggtttttgtggttgcgacgttcgtgtcgttattttgggtgttggcggcggaaatcggtattttaattttttttcggtgcgaatttggagaagttattttagttgtgagggacggttgcgttttatggtttaggtaagggtattttcgttggagtagtatcgcggacggatattatgagggtggtgggacgttggcggaacgttggcggaacgttggcggtgtgagaggtgtggggtaatggcgatttttgttatggtagaaatagtttaaaggatttttttcgtttggttttttacgtagtttagttttgtttttttagggatgttttttattttttaatttttttagttttatttggttatattgttaaaatatgtttgtgatttttaaacgttagtttatttttagtattatttggggagtttgttaagttacgaatttcgaggttttattggagagtttgatttaatgattttggagtggcggtcggataatttgtttgttggggtgattttaacgtagttgatgcgaagattttatttagggaattattgggttggcgtttgtaatgcgttttttttagttataggataaagaggtgttaatttaattgtgtttttttagaagagtttattatttataggtgagttattagtttttgtataattaaggataaggttaattgataatttagtaaataatcgagtttattttgtgtttgcgagttaggggtttaatttggggtggtttgtagattaagtatttttattgtatataataaacgtatattagtaaattatttatggaatttttaaaaaaatttttgagttagtttattagttttaaagattaatttagagagtatgttttatttattttag

SEQ ID NO: 65 - DNA, 3001 bp, homo sapiens
ttttttttttattataggtgtattatttagtttttatttttatatgagaagtttattttttgttttaaaagtaaagttggatttttattttttgggagaaaattatttataatagttgtttttttttagtttaaaaaggtaagattattaaatagtgagagtgtggaaggataaaaggataatgtttaggttattattttatttagaagaagaatgttttttgttttttgaattttgaaatttgattttttttttttatttttataatttataaaagaaaaaaaaggaaaagggttgatgtttgtaattttagtattttgggaggttgaggagggtggattatttgaggttgggagtttgagattagtttgaataatatggagaaattttattttaattaaaaatataaaaattagttgggtgtggtggtgtatgtttgtaattttagttatttgggaggttgagataggagaattgtttgaatttaggaaatggaggttgtggtgggttgatattgtgttattgtattttagtttgggtaataagagtaaaattttgttttaaaaaaagaaaaaaaagaaagaaaagaaaaggaaagaaaaaaaggagagggatggtgggggttttattatgtaggattattttgtttagaatttgtataggtaggttttatttttatttatatgattttttgagttaaagtagaaggatatggttatgttttttagttagattgtttagtgtagaggaagtaaatttgtttttggtttttatttttgagtttttattaatgttataaattaagatatattgtttttttttttttgtgttgtgatttatttattaattttattttatagggggagagtgagttatatgtatatatatgaatgtgtgtatatatatatatttatattttttttttttggttagagtaaatataattgtgatttagaatttttgtttatgttatttttttgtttttatgtaatttattattaaaattttttaggagttaattaagtttgaggaattggataaagttttttaaaaattaagtaggtgtagggtttatagtttgaggttggttttattttgtttggatatttgagtttggttgagattaagttgttatgtttatttttggtgttggagtttttagtttttaggggtggttagtgaataagtgttatttttttggttttgatttatttttatagtaaattttattttgttttttgttttgatggttttattttatttttaagtttaggttttatattatgtttttttgtgtttttaattttgtttagtttattttattttggagttagttttttttttggttttgtgtggggtttttttttgttaggtttagggttgggttttggtgggaattttgtttggtttttgttttttgtattttagtattattttgttgttttataagttttggttttgtggtgttgtaatttttttttttgggaaaggaatgtgtttgatatttattgtttagtttggtgtttgttgttgtttttatagtaggttttaagtttgagttttggttttgttgttgttattgttggttggtttagagtttggagtttttgtttatttttttgtttttttttgttattgtatttggaaatttgtttgttgtaaatattttaggaatagtttttttaattaatgagttgaggttggggttgttgatggatgtttttttgattggtagtagagagggtttaatggttgagtgtatttttttatttttggatttgattttttaagattgatataatttttggtttaatgagtatttaggtttgttttgtggtatggatttattaatgaggagggtgaaggttttagtgtttggtattttgggttttttggttgtgtttttgtggtgggtgatgttagtgggtttgggtgttgggtgaagtatttaggttgggtgtttttagtgttttttgtggtgggggaatgaaggtttaggttagggaataggaaggtgtattgttgttagagtgtggaatatttttgttttgagggtttttatagtgatttgtaaaagtttagtgagatttgagaatgttgaggtgggatatgaagtatgtggtttttgtggttgtgatgtttgtgttgttattttgggtgttggtggtggaaattggtattttaatttttttttggtgtgaatttggagaagttattttagttgtgagggatggttgtgttttatggtttaggtaagggtatttttgttggagtagtattgtggatggatattatgagggtggtgggatgttggtggaatgttggtggaatgttggtggtgtgagaggtgtggggtaatggtgatttttgttatggtagaaatagtttaaaggattttttttgtttggttttttatgtagtttagttttgtttttttagggatgttttttattttttaatttttttagttttatttggttatattgttaaaatatgtttgtgatttttaaatgttagtttatttttagtattatttggggagtttgttaagttatgaattttgaggttttattggagagtttgatttaatgattttggagtggtggttggataatttgtttgttggggtgattttaatgtagttgatgtgaagattttatttagggaattattgggttggtgtttgtaatgtgttttttttagttataggataaagaggtgttaatttaattgtgtttttttagaagagtttattatttataggtgagttattagtttttgtataattaaggataaggttaattgataatttagtaaataattgagtttattttgtgtttgtgagttaggggtttaatttggggtggtttgtagattaagtatttttattgtatataataaatgtatattagtaaattatttatggaatttttaaaaaaatttttgagttagtttattagttttaaagattaatttagagagtatgttttatttattttag

SEQ ID NO: 66 - DNA, 50 bp, homo sapiens
aaaggatggccggcctggcggcgcggttggtcctgctagctggggcagcg

SEQ ID NO: 67 - DNA, 50 bp, homo sapiens
aaaggatggtcggtttggcggcgcggttggttttgttagttggggtagcg

SEQ ID NO: 68 - DNA, 50 bp, homo sapiens
aaaggatggttggtttggtggtgtggttggttttgttagttggggtagtg

SEQ ID NO: 69 - DNA, 50 bp, homo sapiens
cgttgttttagttagtaggattaatcgcgtcgttaggtcggttatttttt

SEQ ID NO: 70 - DNA, 50 bp, homo sapiens
tgttgttttagttagtaggattaattgtgttgttaggttggttatttttt

SEQ ID NO: 71 - DNA, 3001 bp, homo sapiens
cagtattgtaaaagaactaatctgtaagatgcaaagtagtattagcactggatttccggtcagctcctggagggctaaggggttgttttgttcatttcagcttctcagtcagtatcagttgggtggtcaactccaggggacactattcatgttatatttaactggaagaatttgccattcacagaaaaggcaatgtgaatgctgctccccagagcaccattcacagaaaatgcaatgtgaatggtgcctcctggagattttgccttgcttagcaaggtgctagagctaaggactcagaaatgtttgttaagtgagtgaatggaatcccaggctacttcttactcattccaacccccaggacgaaaaagaaaagttgacaaggggtgaggagagtgggggaggagaaagggtgatccttagctacaaggcttctatgagattgggtgtgggtcggtgctgatgggagtgcaggggaggtgagcagggagaggatactaaagcaagcgtcctgttcccagggttcctaattttcctagaaatattacttctctccgatctcagtgcagaaccatactgatgattttacagccctggatttgtcaagttcttatgttgatgtatgctgttcattcattaaacagaagaacaaacaaacgcagttagcgcctaccataagccaaattctgtgctggaggtagagtggtgaacaggacagcaaaggttctaccccgcatggggaagcaatcaccctcgggaggtggtacttcaattgcgactagaagaaaaaagaagagtgagtgattcagaccaggccaggcagtcaggaagcttgagggacatagccctctgaagcgggtctggagcaagggagtgagggagaccagtggacaggggccaaatcaggcagggtttgtggagactgtattttacccaaggtaattgggagccagtaaataattttaagaaaaaaaaagtgatatgggcaaattttaatttttcaaaatggagcgcaggttggaagaggcaaaagtagaggcagggagagccattaagaagctactgcggctgtcttggcgacacatgatggtgtctttaaccagggtggtgccagaagagatggagagaagtggatagttacaggtacgtttaggaagtaaaatccgacaggggtggtgacagtaaacagccctacctcaaaaaagatcatggaaaacacttcagtttgctcattaacccatcaggcgtccgccttcccttaaccctatcgcctcgatatatggacacagcagggggacgaggggcggggcaggcgcccacaaaaatccgggaactttaatttaaactgtgtggacttcagcggagagtagaataaagaacacaggaacttccggttactccggaagtggaagcttcatactcctaagctcctcccccggcggcgagccagggagaaaggatggccggcctggcggcgcggttggtcctgctagctggggcagcggcgctggcgagcggctcccagggcgaccgtgagccggtgtaccgcgactgcgtactgcagtgcgaagagcagaactgctctgggggcgctctgaatcacttccgctcccgccagccaatctacatgagtctagcaggtaagccccacccccacggtaagccccgcccatttgtcttgctcccgccccctgcgcccccaatacgcctctgcaatccctgaaccttagtttccccacgaggtctcttatgaatgtgagtgaagcccctaaggtgatgagagccttaccagcctctcttactttcccagaagctttcatttacttatttgttcagtcaaaagggtatttattaaatacattcgggccacaatgtctaggaatggcacagaaatcagaccagggtcccgcccattgggactcacagtccccacggggacatgagccttttcaagtgcaaggcagagaatgatttgagcccctgaaagactctttgattaggaagcatttgggataggaaggtgtcagttccggctttgaagacgtgggggcagggatcatcttggaacgttttgtttgaaggagggactttggactggtacattcgatttggaccatagtgggcaaagaaccaacgtattgagcactcactgtgtgacaggtgtcacaatatgtcaagtaatttttatcacaccctttgagatagtttctctaatcccagttttacagatggggattagagagattaaatgccctgcccaaggtcacacagccagtatgtagtaaagtggagtttccagttctggcctgtttgaccacaagcttgtcctctttactattataccactttgcattccagacagagggaacagagagaatggatgccctgggcagatgtgggcacatccaggagctttatttactcagggagcagggtacatgaacaggagtagtgaccaatacggttggaaaggcaatttggagcctcaaaagtcaggttgaagaatttgggcttcattttcataggaagggagtaagatagcaagaactccttccaggagagtaagagcaaatcctatattcaggaaggacaaatataaacccaggtttccatagatgagttcatcagatgccaacatcttgatggacttgagcaaaaggagaggaaatgtctgccaaggtagaaagatcatctgagccctggagttcaagactagcctaggcaacatgacaagatgccttctctacaaaaaataaaagaattagccagacattgtggtctcgctacttgggaggctgaggtgggaggatcgtttgagcccaggaggtcaaggctgtggtgagccatgctctccccactgcactccagcctggatgaaagagcgagaccctgtctcaaaaaaaaaaaaaaaaaaaaaatgccgggtgcggtggctcgtgcctgcaatccccgcactttaggtggcagaggcaggcagataacctgaggttgggagttcaagacc

SEQ ID NO: 72 - DNA, 3001 bp, homo sapiens
tagtattgtaaaagaattaatttgtaagatgtaaagtagtattagtattggattttcggttagtttttggagggttaaggggttgttttgtttattttagttttttagttagtattagttgggtggttaattttaggggatattatttatgttatatttaattggaagaatttgttatttatagaaaaggtaatgtgaatgttgttttttagagtattatttatagaaaatgtaatgtgaatggtgttttttggagattttgttttgtttagtaaggtgttagagttaaggatttagaaatgtttgttaagtgagtgaatggaattttaggttattttttatttattttaatttttaggacgaaaaagaaaagttgataaggggtgaggagagtgggggaggagaaagggtgatttttagttataaggtttttatgagattgggtgtgggtcggtgttgatgggagtgtaggggaggtgagtagggagaggatattaaagtaagcgttttgtttttagggtttttaatttttttagaaatattattttttttcgattttagtgtagaattatattgatgattttatagttttggatttgttaagtttttatgttgatgtatgttgtttatttattaaatagaagaataaataaacgtagttagcgtttattataagttaaattttgtgttggaggtagagtggtgaataggatagtaaaggttttatttcgtatggggaagtaattattttcgggaggtggtattttaattgcgattagaagaaaaaagaagagtgagtgatttagattaggttaggtagttaggaagtttgagggatatagttttttgaagcgggtttggagtaagggagtgagggagattagtggataggggttaaattaggtagggtttgtggagattgtattttatttaaggtaattgggagttagtaaataattttaagaaaaaaaaagtgatatgggtaaattttaattttttaaaatggagcgtaggttggaagaggtaaaagtagaggtagggagagttattaagaagttattgcggttgttttggcgatatatgatggtgtttttaattagggtggtgttagaagagatggagagaagtggatagttataggtacgtttaggaagtaaaattcgataggggtggtgatagtaaatagttttattttaaaaaagattatggaaaatattttagtttgtttattaatttattaggcgttcgtttttttttaattttatcgtttcgatatatggatatagtagggggacgaggggcggggtaggcgtttataaaaattcgggaattttaatttaaattgtgtggattttagcggagagtagaataaagaatataggaattttcggttatttcggaagtggaagttttatatttttaagtttttttttcggcggcgagttagggagaaaggatggtcggtttggcggcgcggttggttttgttagttggggtagcggcgttggcgagcggtttttagggcgatcgtgagtcggtgtatcgcgattgcgtattgtagtgcgaagagtagaattgttttgggggcgttttgaattattttcgttttcgttagttaatttatatgagtttagtaggtaagttttatttttacggtaagtttcgtttatttgttttgttttcgttttttgcgtttttaatacgtttttgtaatttttgaattttagtttttttacgaggttttttatgaatgtgagtgaagtttttaaggtgatgagagttttattagttttttttatttttttagaagtttttatttatttatttgtttagttaaaagggtatttattaaatatattcgggttataatgtttaggaatggtatagaaattagattagggtttcgtttattgggatttatagtttttacggggatatgagtttttttaagtgtaaggtagagaatgatttgagtttttgaaagattttttgattaggaagtatttgggataggaaggtgttagtttcggttttgaagacgtgggggtagggattattttggaacgttttgtttgaaggagggattttggattggtatattcgatttggattatagtgggtaaagaattaacgtattgagtatttattgtgtgataggtgttataatatgttaagtaatttttattatattttttgagatagtttttttaattttagttttatagatggggattagagagattaaatgttttgtttaaggttatatagttagtatgtagtaaagtggagtttttagttttggtttgtttgattataagtttgttttttttattattatattattttgtattttagatagagggaatagagagaatggatgttttgggtagatgtgggtatatttaggagttttatttatttagggagtagggtatatgaataggagtagtgattaatacggttggaaaggtaatttggagttttaaaagttaggttgaagaatttgggttttatttttataggaagggagtaagatagtaagaattttttttaggagagtaagagtaaattttatatttaggaaggataaatataaatttaggtttttatagatgagtttattagatgttaatattttgatggatttgagtaaaaggagaggaaatgtttgttaaggtagaaagattatttgagttttggagtttaagattagtttaggtaatatgataagatgttttttttataaaaaataaaagaattagttagatattgtggtttcgttatttgggaggttgaggtgggaggatcgtttgagtttaggaggttaaggttgtggtgagttatgttttttttattgtattttagtttggatgaaagagcgagattttgttttaaaaaaaaaaaaaaaaaaaaaatgtcgggtgcggtggttcgtgtttgtaattttcgtattttaggtggtagaggtaggtagataatttgaggttgggagtttaagatt

SEQ ID NO: 73 - DNA, 3001 bp, homo sapiens
tagtattgtaaaagaattaatttgtaagatgtaaagtagtattagtattggatttttggttagtttttggagggttaaggggttgttttgtttattttagttttttagttagtattagttgggtggttaattttaggggatattatttatgttatatttaattggaagaatttgttatttatagaaaaggtaatgtgaatgttgttttttagagtattatttatagaaaatgtaatgtgaatggtgttttttggagattttgttttgtttagtaaggtgttagagttaaggatttagaaatgtttgttaagtgagtgaatggaattttaggttattttttatttattttaatttttaggatgaaaaagaaaagttgataaggggtgaggagagtgggggaggagaaagggtgatttttagttataaggtttttatgagattgggtgtgggttggtgttgatgggagtgtaggggaggtgagtagggagaggatattaaagtaagtgttttgtttttagggtttttaatttttttagaaatattatttttttttgattttagtgtagaattatattgatgattttatagttttggatttgttaagtttttatgttgatgtatgttgtttatttattaaatagaagaataaataaatgtagttagtgtttattataagttaaattttgtgttggaggtagagtggtgaataggatagtaaaggttttattttgtatggggaagtaattatttttgggaggtggtattttaattgtgattagaagaaaaaagaagagtgagtgatttagattaggttaggtagttaggaagtttgagggatatagttttttgaagtgggtttggagtaagggagtgagggagattagtggataggggttaaattaggtagggtttgtggagattgtattttatttaaggtaattgggagttagtaaataattttaagaaaaaaaaagtgatatgggtaaattttaattttttaaaatggagtgtaggttggaagaggtaaaagtagaggtagggagagttattaagaagttattgtggttgttttggtgatatatgatggtgtttttaattagggtggtgttagaagagatggagagaagtggatagttataggtatgtttaggaagtaaaatttgataggggtggtgatagtaaatagttttattttaaaaaagattatggaaaatattttagtttgtttattaatttattaggtgtttgtttttttttaattttattgttttgatatatggatatagtagggggatgaggggtggggtaggtgtttataaaaatttgggaattttaatttaaattgtgtggattttagtggagagtagaataaagaatataggaatttttggttattttggaagtggaagttttatatttttaagttttttttttggtggtgagttagggagaaaggatggttggtttggtggtgtggttggttttgttagttggggtagtggtgttggtgagtggtttttagggtgattgtgagttggtgtattgtgattgtgtattgtagtgtgaagagtagaattgttttgggggtgttttgaattatttttgtttttgttagttaatttatatgagtttagtaggtaagttttatttttatggtaagttttgtttatttgttttgtttttgttttttgtgtttttaatatgtttttgtaatttttgaattttagtttttttatgaggttttttatgaatgtgagtgaagtttttaaggtgatgagagttttattagttttttttatttttttagaagtttttatttatttatttgtttagttaaaagggtatttattaaatatatttgggttataatgtttaggaatggtatagaaattagattagggttttgtttattgggatttatagtttttatggggatatgagtttttttaagtgtaaggtagagaatgatttgagtttttgaaagattttttgattaggaagtatttgggataggaaggtgttagttttggttttgaagatgtgggggtagggattattttggaatgttttgtttgaaggagggattttggattggtatatttgatttggattatagtgggtaaagaattaatgtattgagtatttattgtgtgataggtgttataatatgttaagtaatttttattatattttttgagatagtttttttaattttagttttatagatggggattagagagattaaatgttttgtttaaggttatatagttagtatgtagtaaagtggagtttttagttttggtttgtttgattataagtttgttttttttattattatattattttgtattttagatagagggaatagagagaatggatgttttgggtagatgtgggtatatttaggagttttatttatttagggagtagggtatatgaataggagtagtgattaatatggttggaaaggtaatttggagttttaaaagttaggttgaagaatttgggttttatttttataggaagggagtaagatagtaagaattttttttaggagagtaagagtaaattttatatttaggaaggataaatataaatttaggtttttatagatgagtttattagatgttaatattttgatggatttgagtaaaaggagaggaaatgtttgttaaggtagaaagattatttgagttttggagtttaagattagtttaggtaatatgataagatgttttttttataaaaaataaaagaattagttagatattgtggttttgttatttgggaggttgaggtgggaggattgtttgagtttaggaggttaaggttgtggtgagttatgttttttttattgtattttagtttggatgaaagagtgagattttgttttaaaaaaaaaaaaaaaaaaaaaatgttgggtgtggtggtttgtgtttgtaatttttgtattttaggtggtagaggtaggtagataatttgaggttgggagtttaagatt

SEQ ID NO: 74 - DNA, 3001 bp, homo sapiens
ggttttgaatttttaattttaggttatttgtttgtttttgttatttaaagtgcggggattgtaggtacgagttatcgtattcggtattttttttttttttttttttttgagatagggtttcgtttttttatttaggttggagtgtagtggggagagtatggtttattatagttttgattttttgggtttaaacgatttttttattttagttttttaagtagcgagattataatgtttggttaatttttttattttttgtagagaaggtattttgttatgttgtttaggttagttttgaattttagggtttagatgatttttttattttggtagatattttttttttttttgtttaagtttattaagatgttggtatttgatgaatttatttatggaaatttgggtttatatttgttttttttgaatataggatttgtttttatttttttggaaggagtttttgttattttattttttttttatgaaaatgaagtttaaattttttaatttgatttttgaggttttaaattgtttttttaatcgtattggttattatttttgtttatgtattttgttttttgagtaaataaagtttttggatgtgtttatatttgtttagggtatttattttttttgttttttttgtttggaatgtaaagtggtataatagtaaagaggataagtttgtggttaaataggttagaattggaaattttattttattatatattggttgtgtgattttgggtagggtatttaatttttttaatttttatttgtaaaattgggattagagaaattattttaaagggtgtgataaaaattatttgatatattgtgatatttgttatatagtgagtgtttaatacgttggttttttgtttattatggtttaaatcgaatgtattagtttaaagttttttttttaaataaaacgttttaagatgatttttgtttttacgtttttaaagtcggaattgatatttttttattttaaatgttttttaattaaagagttttttaggggtttaaattattttttgttttgtatttgaaaaggtttatgttttcgtggggattgtgagttttaatgggcgggattttggtttgatttttgtgttatttttagatattgtggttcgaatgtatttaataaatatttttttgattgaataaataagtaaatgaaagtttttgggaaagtaagagaggttggtaaggtttttattattttaggggttttatttatatttataagagatttcgtggggaaattaaggtttagggattgtagaggcgtattgggggcgtagggggcgggagtaagataaatgggcggggtttatcgtgggggtggggtttatttgttagatttatgtagattggttggcgggagcggaagtgatttagagcgtttttagagtagttttgtttttcgtattgtagtacgtagtcgcggtatatcggtttacggtcgttttgggagtcgttcgttagcgtcgttgttttagttagtaggattaatcgcgtcgttaggtcggttattttttttttttggttcgtcgtcgggggaggagtttaggagtatgaagtttttattttcggagtaatcggaagtttttgtgttttttattttatttttcgttgaagtttatatagtttaaattaaagttttcggatttttgtgggcgtttgtttcgtttttcgtttttttgttgtgtttatatatcgaggcgatagggttaagggaaggcggacgtttgatgggttaatgagtaaattgaagtgttttttatgattttttttgaggtagggttgtttattgttattatttttgtcggattttattttttaaacgtatttgtaattatttatttttttttattttttttggtattattttggttaaagatattattatgtgtcgttaagatagtcgtagtagttttttaatggttttttttgtttttatttttgttttttttaatttgcgttttattttgaaaaattaaaatttgtttatattatttttttttttttaaaattatttattggtttttaattattttgggtaaaatatagtttttataaattttgtttgatttggtttttgtttattggttttttttatttttttgttttagattcgttttagagggttatgttttttaagttttttgattgtttggtttggtttgaattatttatttttttttttttttttagtcgtaattgaagtattatttttcgagggtgattgtttttttatgcggggtagaatttttgttgttttgtttattattttatttttagtatagaatttggtttatggtaggcgttaattgcgtttgtttgtttttttgtttaatgaatgaatagtatatattaatataagaatttgataaatttagggttgtaaaattattagtatggttttgtattgagatcggagagaagtaatatttttaggaaaattaggaattttgggaataggacgtttgttttagtattttttttttgtttattttttttgtatttttattagtatcgatttatatttaattttatagaagttttgtagttaaggattattttttttttttttttattttttttattttttgttaatttttttttttcgttttgggggttggaatgagtaagaagtagtttgggattttatttatttatttaataaatatttttgagtttttagttttagtattttgttaagtaaggtaaaatttttaggaggtattatttatattgtattttttgtgaatggtgttttggggagtagtatttatattgttttttttgtgaatggtaaatttttttagttaaatataatatgaatagtgttttttggagttgattatttaattgatattgattgagaagttgaaatgaataaaataattttttagttttttaggagttgatcggaaatttagtgttaatattattttgtattttatagattagtttttttataatattg

SEQ ID NO: 75 - DNA, 3001 bp, homo sapiens
ggttttgaatttttaattttaggttatttgtttgtttttgttatttaaagtgtggggattgtaggtatgagttattgtatttggtattttttttttttttttttttttgagatagggttttgtttttttatttaggttggagtgtagtggggagagtatggtttattatagttttgattttttgggtttaaatgatttttttattttagttttttaagtagtgagattataatgtttggttaatttttttattttttgtagagaaggtattttgttatgttgtttaggttagttttgaattttagggtttagatgatttttttattttggtagatattttttttttttttgtttaagtttattaagatgttggtatttgatgaatttatttatggaaatttgggtttatatttgttttttttgaatataggatttgtttttatttttttggaaggagtttttgttattttattttttttttatgaaaatgaagtttaaattttttaatttgatttttgaggttttaaattgtttttttaattgtattggttattatttttgtttatgtattttgttttttgagtaaataaagtttttggatgtgtttatatttgtttagggtatttattttttttgttttttttgtttggaatgtaaagtggtataatagtaaagaggataagtttgtggttaaataggttagaattggaaattttattttattatatattggttgtgtgattttgggtagggtatttaatttttttaatttttatttgtaaaattgggattagagaaattattttaaagggtgtgataaaaattatttgatatattgtgatatttgttatatagtgagtgtttaatatgttggttttttgtttattatggtttaaattgaatgtattagtttaaagttttttttttaaataaaatgttttaagatgatttttgtttttatgtttttaaagttggaattgatatttttttattttaaatgttttttaattaaagagttttttaggggtttaaattattttttgttttgtatttgaaaaggtttatgtttttgtggggattgtgagttttaatgggtgggattttggtttgatttttgtgttatttttagatattgtggtttgaatgtatttaataaatatttttttgattgaataaataagtaaatgaaagtttttgggaaagtaagagaggttggtaaggtttttattattttaggggttttatttatatttataagagattttgtggggaaattaaggtttagggattgtagaggtgtattgggggtgtagggggtgggagtaagataaatgggtggggtttattgtgggggtggggtttatttgttagatttatgtagattggttggtgggagtggaagtgatttagagtgtttttagagtagttttgttttttgtattgtagtatgtagttgtggtatattggtttatggttgttttgggagttgtttgttagtgttgttgttttagttagtaggattaattgtgttgttaggttggttattttttttttttggtttgttgttgggggaggagtttaggagtatgaagtttttatttttggagtaattggaagtttttgtgttttttattttattttttgttgaagtttatatagtttaaattaaagtttttggatttttgtgggtgtttgttttgttttttgtttttttgttgtgtttatatattgaggtgatagggttaagggaaggtggatgtttgatgggttaatgagtaaattgaagtgttttttatgattttttttgaggtagggttgtttattgttattatttttgttggattttattttttaaatgtatttgtaattatttatttttttttattttttttggtattattttggttaaagatattattatgtgttgttaagatagttgtagtagttttttaatggttttttttgtttttatttttgttttttttaatttgtgttttattttgaaaaattaaaatttgtttatattatttttttttttttaaaattatttattggtttttaattattttgggtaaaatatagtttttataaattttgtttgatttggtttttgtttattggttttttttatttttttgttttagatttgttttagagggttatgttttttaagttttttgattgtttggtttggtttgaattatttatttttttttttttttttagttgtaattgaagtattattttttgagggtgattgtttttttatgtggggtagaatttttgttgttttgtttattattttatttttagtatagaatttggtttatggtaggtgttaattgtgtttgtttgtttttttgtttaatgaatgaatagtatatattaatataagaatttgataaatttagggttgtaaaattattagtatggttttgtattgagattggagagaagtaatatttttaggaaaattaggaattttgggaataggatgtttgttttagtattttttttttgtttattttttttgtatttttattagtattgatttatatttaattttatagaagttttgtagttaaggattattttttttttttttttattttttttattttttgttaattttttttttttgttttgggggttggaatgagtaagaagtagtttgggattttatttatttatttaataaatatttttgagtttttagttttagtattttgttaagtaaggtaaaatttttaggaggtattatttatattgtattttttgtgaatggtgttttggggagtagtatttatattgttttttttgtgaatggtaaatttttttagttaaatataatatgaatagtgttttttggagttgattatttaattgatattgattgagaagttgaaatgaataaaataattttttagttttttaggagttgattggaaatttagtgttaatattattttgtattttatagattagtttttttataatattg

SEQ ID NO: 76 - DNA, 2177 bp, homo sapiens
cccacatctgcccagggcatccattctctctgttccctctgtctggaatgcaaagtggtataatagtaaagaggacaagcttgtggtcaaacaggccagaactggaaactccactttactacatactggctgtgtgaccttgggcagggcatttaatctctctaatccccatctgtaaaactgggattagagaaactatctcaaagggtgtgataaaaattacttgacatattgtgacacctgtcacacagtgagtgctcaatacgttggttctttgcccactatggtccaaatcgaatgtaccagtccaaagtccctccttcaaacaaaacgttccaagatgatccctgcccccacgtcttcaaagccggaactgacaccttcctatcccaaatgcttcctaatcaaagagtctttcaggggctcaaatcattctctgccttgcacttgaaaaggctcatgtccccgtggggactgtgagtcccaatgggcgggaccctggtctgatttctgtgccattcctagacattgtggcccgaatgtatttaataaatacccttttgactgaacaaataagtaaatgaaagcttctgggaaagtaagagaggctggtaaggctctcatcaccttaggggcttcactcacattcataagagacctcgtggggaaactaaggttcagggattgcagaggcgtattgggggcgcagggggcgggagcaagacaaatgggcggggcttaccgtgggggtggggcttacctgctagactcatgtagattggctggcgggagcggaagtgattcagagcgcccccagagcagttctgctcttcgcactgcagtacgcagtcgcggtacaccggctcacggtcgccctgggagccgctcgccagcgccgctgccccagctagcaggaccaaccgcgccgccaggccggccatcctttctccctggctcgccgccgggggaggagcttaggagtatgaagcttccacttccggagtaaccggaagttcctgtgttctttattctactctccgctgaagtccacacagtttaaattaaagttcccggatttttgtgggcgcctgccccgcccctcgtccccctgctgtgtccatatatcgaggcgatagggttaagggaaggcggacgcctgatgggttaatgagcaaactgaagtgttttccatgatcttttttgaggtagggctgtttactgtcaccacccctgtcggattttacttcctaaacgtacctgtaactatccacttctctccatctcttctggcaccaccctggttaaagacaccatcatgtgtcgccaagacagccgcagtagcttcttaatggctctccctgcctctacttttgcctcttccaacctgcgctccattttgaaaaattaaaatttgcccatatcactttttttttcttaaaattatttactggctcccaattaccttgggtaaaatacagtctccacaaaccctgcctgatttggcccctgtccactggtctccctcactcccttgctccagacccgcttcagagggctatgtccctcaagcttcctgactgcctggcctggtctgaatcactcactcttcttttttcttctagtcgcaattgaagtaccacctcccgagggtgattgcttccccatgcggggtagaacctttgctgtcctgttcaccactctacctccagcacagaatttggcttatggtaggcgctaactgcgtttgtttgttcttctgtttaatgaatgaacagcatacatcaacataagaacttgacaaatccagggctgtaaaatcatcagtatggttctgcactgagatcggagagaagtaatatttctaggaaaattaggaaccctgggaacaggacgcttgctttagtatcctctccctgctcacctcccctgcactcccatcagcaccgacccacacccaatctcatagaagccttgtagctaaggatcaccctttctcctcccccactctcctcaccccttgtcaacttttctttttcgtcctgggggttggaatgagtaagaagtagcctgggattccattcactcacttaacaaacatttctgagtccttagctctagcaccttgctaagcaaggcaaaatctccaggaggcaccattcacattgcattttctgtga

SEQ ID NO: 77 - DNA, 2177 bp, homo sapiens
tttatatttgtttagggtatttattttttttgttttttttgtttggaatgtaaagtggtataatagtaaagaggataagtttgtggttaaataggttagaattggaaattttattttattatatattggttgtgtgattttgggtagggtatttaatttttttaatttttatttgtaaaattgggattagagaaattattttaaagggtgtgataaaaattatttgatatattgtgatatttgttatatagtgagtgtttaatacgttggttttttgtttattatggtttaaatcgaatgtattagtttaaagttttttttttaaataaaacgttttaagatgatttttgtttttacgtttttaaagtcggaattgatatttttttattttaaatgttttttaattaaagagttttttaggggtttaaattattttttgttttgtatttgaaaaggtttatgttttcgtggggattgtgagttttaatgggcgggattttggtttgatttttgtgttatttttagatattgtggttcgaatgtatttaataaatatttttttgattgaataaataagtaaatgaaagtttttgggaaagtaagagaggttggtaaggtttttattattttaggggttttatttatatttataagagatttcgtggggaaattaaggtttagggattgtagaggcgtattgggggcgtagggggcgggagtaagataaatgggcggggtttatcgtgggggtggggtttatttgttagatttatgtagattggttggcgggagcggaagtgatttagagcgtttttagagtagttttgtttttcgtattgtagtacgtagtcgcggtatatcggtttacggtcgttttgggagtcgttcgttagcgtcgttgttttagttagtaggattaatcgcgtcgttaggtcggttattttttttttttggttcgtcgtcgggggaggagtttaggagtatgaagtttttattttcggagtaatcggaagtttttgtgttttttattttatttttcgttgaagtttatatagtttaaattaaagttttcggatttttgtgggcgtttgtttcgtttttcgtttttttgttgtgtttatatatcgaggcgatagggttaagggaaggcggacgtttgatgggttaatgagtaaattgaagtgttttttatgattttttttgaggtagggttgtttattgttattatttttgtcggattttattttttaaacgtatttgtaattatttatttttttttattttttttggtattattttggttaaagatattattatgtgtcgttaagatagtcgtagtagttttttaatggttttttttgtttttatttttgttttttttaatttgcgttttattttgaaaaattaaaatttgtttatattatttttttttttttaaaattatttattggtttttaattattttgggtaaaatatagtttttataaattttgtttgatttggtttttgtttattggttttttttatttttttgttttagattcgttttagagggttatgttttttaagttttttgattgtttggtttggtttgaattatttatttttttttttttttttagtcgtaattgaagtattatttttcgagggtgattgtttttttatgcggggtagaatttttgttgttttgtttattattttatttttagtatagaatttggtttatggtaggcgttaattgcgtttgtttgtttttttgtttaatgaatgaatagtatatattaatataagaatttgataaatttagggttgtaaaattattagtatggttttgtattgagatcggagagaagtaatatttttaggaaaattaggaattttgggaataggacgtttgttttagtattttttttttgtttattttttttgtatttttattagtatcgatttatatttaattttatagaagttttgtagttaaggattattttttttttttttttattttttttattttttgttaatttttttttttcgttttgggggttggaatgagtaagaagtagtttgggattttatttatttatttaataaatatttttgagtttttagttttagtattttgttaagtaaggtaaaatttttaggaggtattatttatattgtattttttgtga

SEQ ID NO: 78 - DNA, 2177 bp, homo sapiens
tttatatttgtttagggtatttattttttttgttttttttgtttggaatgtaaagtggtataatagtaaagaggataagtttgtggttaaataggttagaattggaaattttattttattatatattggttgtgtgattttgggtagggtatttaatttttttaatttttatttgtaaaattgggattagagaaattattttaaagggtgtgataaaaattatttgatatattgtgatatttgttatatagtgagtgtttaatatgttggttttttgtttattatggtttaaattgaatgtattagtttaaagttttttttttaaataaaatgttttaagatgatttttgtttttatgtttttaaagttggaattgatatttttttattttaaatgttttttaattaaagagttttttaggggtttaaattattttttgttttgtatttgaaaaggtttatgtttttgtggggattgtgagttttaatgggtgggattttggtttgatttttgtgttatttttagatattgtggtttgaatgtatttaataaatatttttttgattgaataaataagtaaatgaaagtttttgggaaagtaagagaggttggtaaggtttttattattttaggggttttatttatatttataagagattttgtggggaaattaaggtttagggattgtagaggtgtattgggggtgtagggggtgggagtaagataaatgggtggggtttattgtgggggtggggtttatttgttagatttatgtagattggttggtgggagtggaagtgatttagagtgtttttagagtagttttgttttttgtattgtagtatgtagttgtggtatattggtttatggttgttttgggagttgtttgttagtgttgttgttttagttagtaggattaattgtgttgttaggttggttattttttttttttggtttgttgttgggggaggagtttaggagtatgaagtttttatttttggagtaattggaagtttttgtgttttttattttattttttgttgaagtttatatagtttaaattaaagtttttggatttttgtgggtgtttgttttgttttttgtttttttgttgtgtttatatattgaggtgatagggttaagggaaggtggatgtttgatgggttaatgagtaaattgaagtgttttttatgattttttttgaggtagggttgtttattgttattatttttgttggattttattttttaaatgtatttgtaattatttatttttttttattttttttggtattattttggttaaagatattattatgtgttgttaagatagttgtagtagttttttaatggttttttttgtttttatttttgttttttttaatttgtgttttattttgaaaaattaaaatttgtttatattatttttttttttttaaaattatttattggtttttaattattttgggtaaaatatagtttttataaattttgtttgatttggtttttgtttattggttttttttatttttttgttttagatttgttttagagggttatgttttttaagttttttgattgtttggtttggtttgaattatttatttttttttttttttttagttgtaattgaagtattattttttgagggtgattgtttttttatgtggggtagaatttttgttgttttgtttattattttatttttagtatagaatttggtttatggtaggtgttaattgtgtttgtttgtttttttgtttaatgaatgaatagtatatattaatataagaatttgataaatttagggttgtaaaattattagtatggttttgtattgagattggagagaagtaatatttttaggaaaattaggaattttgggaataggatgtttgttttagtattttttttttgtttattttttttgtatttttattagtattgatttatatttaattttatagaagttttgtagttaaggattattttttttttttttttattttttttattttttgttaattttttttttttgttttgggggttggaatgagtaagaagtagtttgggattttatttatttatttaataaatatttttgagtttttagttttagtattttgttaagtaaggtaaaatttttaggaggtattatttatattgtattttttgtga

SEQ ID NO: 79 - DNA, 2177 bp, homo sapiens
ttatagaaaatgtaatgtgaatggtgttttttggagattttgttttgtttagtaaggtgttagagttaaggatttagaaatgtttgttaagtgagtgaatggaattttaggttattttttatttattttaatttttaggacgaaaaagaaaagttgataaggggtgaggagagtgggggaggagaaagggtgatttttagttataaggtttttatgagattgggtgtgggtcggtgttgatgggagtgtaggggaggtgagtagggagaggatattaaagtaagcgttttgtttttagggtttttaatttttttagaaatattattttttttcgattttagtgtagaattatattgatgattttatagttttggatttgttaagtttttatgttgatgtatgttgtttatttattaaatagaagaataaataaacgtagttagcgtttattataagttaaattttgtgttggaggtagagtggtgaataggatagtaaaggttttatttcgtatggggaagtaattattttcgggaggtggtattttaattgcgattagaagaaaaaagaagagtgagtgatttagattaggttaggtagttaggaagtttgagggatatagttttttgaagcgggtttggagtaagggagtgagggagattagtggataggggttaaattaggtagggtttgtggagattgtattttatttaaggtaattgggagttagtaaataattttaagaaaaaaaaagtgatatgggtaaattttaattttttaaaatggagcgtaggttggaagaggtaaaagtagaggtagggagagttattaagaagttattgcggttgttttggcgatatatgatggtgtttttaattagggtggtgttagaagagatggagagaagtggatagttataggtacgtttaggaagtaaaattcgataggggtggtgatagtaaatagttttattttaaaaaagattatggaaaatattttagtttgtttattaatttattaggcgttcgtttttttttaattttatcgtttcgatatatggatatagtagggggacgaggggcggggtaggcgtttataaaaattcgggaattttaatttaaattgtgtggattttagcggagagtagaataaagaatataggaattttcggttatttcggaagtggaagttttatatttttaagtttttttttcggcggcgagttagggagaaaggatggtcggtttggcggcgcggttggttttgttagttggggtagcggcgttggcgagcggtttttagggcgatcgtgagtcggtgtatcgcgattgcgtattgtagtgcgaagagtagaattgttttgggggcgttttgaattattttcgttttcgttagttaatttatatgagtttagtaggtaagttttatttttacggtaagtttcgtttatttgttttgttttcgttttttgcgtttttaatacgtttttgtaatttttgaattttagtttttttacgaggttttttatgaatgtgagtgaagtttttaaggtgatgagagttttattagttttttttatttttttagaagtttttatttatttatttgtttagttaaaagggtatttattaaatatattcgggttataatgtttaggaatggtatagaaattagattagggtttcgtttattgggatttatagtttttacggggatatgagtttttttaagtgtaaggtagagaatgatttgagtttttgaaagattttttgattaggaagtatttgggataggaaggtgttagtttcggttttgaagacgtgggggtagggattattttggaacgttttgtttgaaggagggattttggattggtatattcgatttggattatagtgggtaaagaattaacgtattgagtatttattgtgtgataggtgttataatatgttaagtaatttttattatattttttgagatagtttttttaattttagttttatagatggggattagagagattaaatgttttgtttaaggttatatagttagtatgtagtaaagtggagtttttagttttggtttgtttgattataagtttgttttttttattattatattattttgtattttagatagagggaatagagagaatggatgttttgggtagatgtggg

SEQ ID NO: 80 - DNA, 2177 bp, homo sapiens
ttatagaaaatgtaatgtgaatggtgttttttggagattttgttttgtttagtaaggtgttagagttaaggatttagaaatgtttgttaagtgagtgaatggaattttaggttattttttatttattttaatttttaggatgaaaaagaaaagttgataaggggtgaggagagtgggggaggagaaagggtgatttttagttataaggtttttatgagattgggtgtgggttggtgttgatgggagtgtaggggaggtgagtagggagaggatattaaagtaagtgttttgtttttagggtttttaatttttttagaaatattatttttttttgattttagtgtagaattatattgatgattttatagttttggatttgttaagtttttatgttgatgtatgttgtttatttattaaatagaagaataaataaatgtagttagtgtttattataagttaaattttgtgttggaggtagagtggtgaataggatagtaaaggttttattttgtatggggaagtaattatttttgggaggtggtattttaattgtgattagaagaaaaaagaagagtgagtgatttagattaggttaggtagttaggaagtttgagggatatagttttttgaagtgggtttggagtaagggagtgagggagattagtggataggggttaaattaggtagggtttgtggagattgtattttatttaaggtaattgggagttagtaaataattttaagaaaaaaaaagtgatatgggtaaattttaattttttaaaatggagtgtaggttggaagaggtaaaagtagaggtagggagagttattaagaagttattgtggttgttttggtgatatatgatggtgtttttaattagggtggtgttagaagagatggagagaagtggatagttataggtatgtttaggaagtaaaatttgataggggtggtgatagtaaatagttttattttaaaaaagattatggaaaatattttagtttgtttattaatttattaggtgtttgtttttttttaattttattgttttgatatatggatatagtagggggatgaggggtggggtaggtgtttataaaaatttgggaattttaatttaaattgtgtggattttagtggagagtagaataaagaatataggaatttttggttattttggaagtggaagttttatatttttaagttttttttttggtggtgagttagggagaaaggatggttggtttggtggtgtggttggttttgttagttggggtagtggtgttggtgagtggtttttagggtgattgtgagttggtgtattgtgattgtgtattgtagtgtgaagagtagaattgttttgggggtgttttgaattatttttgtttttgttagttaatttatatgagtttagtaggtaagttttatttttatggtaagttttgtttatttgttttgtttttgttttttgtgtttttaatatgtttttgtaatttttgaattttagtttttttatgaggttttttatgaatgtgagtgaagtttttaaggtgatgagagttttattagttttttttatttttttagaagtttttatttatttatttgtttagttaaaagggtatttattaaatatatttgggttataatgtttaggaatggtatagaaattagattagggttttgtttattgggatttatagtttttatggggatatgagtttttttaagtgtaaggtagagaatgatttgagtttttgaaagattttttgattaggaagtatttgggataggaaggtgttagttttggttttgaagatgtgggggtagggattattttggaatgttttgtttgaaggagggattttggattggtatatttgatttggattatagtgggtaaagaattaatgtattgagtatttattgtgtgataggtgttataatatgttaagtaatttttattatattttttgagatagtttttttaattttagttttatagatggggattagagagattaaatgttttgtttaaggttatatagttagtatgtagtaaagtggagtttttagttttggtttgtttgattataagtttgttttttttattattatattattttgtattttagatagagggaatagagagaatggatgttttgggtagatgtggg

SEQ ID NO: 81 - DNA, 935 bp, homo sapiens
gggatgacaagaccagatctgtgaagtgacccctggcctctggcacatgttataaagacaaggggtgggaccctccgatctaagaaggctctaagcttcttcagagttcaggcagggctgtcccatgctctctagtagaggtggggacaagtgggtggtacacgctgtgggcccagacaagcagtgtccgtggaagaaccccaaaggaaagcagacaggtgtaacgtcctcagcttccctgcccttcctgctttcttagccaggactaaatttgcttcgctccaagaggcctacacaggaagtggtggctttatctcacccagcctgtgacagtgtgtgccgatgccaggccctgcctacatcagagcccctagccctcagcctggcactcaggggcctctctgctccatctactcttctactcctattcacacagctacaatggggccaaggtttcctggaatgctggaattcaatcccctgtccccacacatgtatgtgtctaagccttgccccacacatgtatgtgtctaagtcccagattaaacctctcctcctccccgggcttccctggcctggcagacttccccagttagaggacgcggtctccccacctcacgactcccagggctctctaccggagcaccccttgactctgcctgccgtctgctgcccaggctgcccagaactgcacctcccactatgcttagctccctggggcaggggattcagcctccacaagtgctaaaccctgtctccacccccagcaaatgctcaatggacactcatcacaggacacggagtggcctagaagaagagctaagttctcaggccctggagccagacagccctggacaccaaccctgtctttattccttgctaacttgttagctgtgcattttgggcaagtttttttcccctctgaatctaactca

SEQ ID NO: 82 - DNA, 935 bp, homo sapiens
gggatgataagattagatttgtgaagtgatttttggtttttggtatatgttataaagataaggggtgggatttttcgatttaagaaggttttaagtttttttagagtttaggtagggttgttttatgttttttagtagaggtggggataagtgggtggtatacgttgtgggtttagataagtagtgttcgtggaagaattttaaaggaaagtagataggtgtaacgtttttagtttttttgttttttttgtttttttagttaggattaaatttgtttcgttttaagaggtttatataggaagtggtggttttattttatttagtttgtgatagtgtgtgtcgatgttaggttttgtttatattagagtttttagtttttagtttggtatttaggggtttttttgttttatttatttttttatttttatttatatagttataatggggttaaggttttttggaatgttggaatttaattttttgtttttatatatgtatgtgtttaagttttgttttatatatgtatgtgtttaagttttagattaaattttttttttttttcgggtttttttggtttggtagatttttttagttagaggacgcggtttttttattttacgatttttagggttttttatcggagtattttttgattttgtttgtcgtttgttgtttaggttgtttagaattgtattttttattatgtttagttttttggggtaggggatttagtttttataagtgttaaattttgtttttatttttagtaaatgtttaatggatatttattataggatacggagtggtttagaagaagagttaagtttttaggttttggagttagatagttttggatattaattttgtttttattttttgttaatttgttagttgtgtattttgggtaagttttttttttttttgaatttaattta

SEQ ID NO: 83 - DNA, 935 bp, homo sapiens
gggatgataagattagatttgtgaagtgatttttggtttttggtatatgttataaagataaggggtgggattttttgatttaagaaggttttaagtttttttagagtttaggtagggttgttttatgttttttagtagaggtggggataagtgggtggtatatgttgtgggtttagataagtagtgtttgtggaagaattttaaaggaaagtagataggtgtaatgtttttagtttttttgttttttttgtttttttagttaggattaaatttgttttgttttaagaggtttatataggaagtggtggttttattttatttagtttgtgatagtgtgtgttgatgttaggttttgtttatattagagtttttagtttttagtttggtatttaggggtttttttgttttatttatttttttatttttatttatatagttataatggggttaaggttttttggaatgttggaatttaattttttgtttttatatatgtatgtgtttaagttttgttttatatatgtatgtgtttaagttttagattaaatttttttttttttttgggtttttttggtttggtagatttttttagttagaggatgtggtttttttattttatgatttttagggttttttattggagtattttttgattttgtttgttgtttgttgtttaggttgtttagaattgtattttttattatgtttagttttttggggtaggggatttagtttttataagtgttaaattttgtttttatttttagtaaatgtttaatggatatttattataggatatggagtggtttagaagaagagttaagtttttaggttttggagttagatagttttggatattaattttgtttttattttttgttaatttgttagttgtgtattttgggtaagttttttttttttttgaatttaattta

SEQ ID NO: 84 - DNA, 935 bp, homo sapiens
tgagttagatttagaggggaaaaaaatttgtttaaaatgtatagttaataagttagtaaggaataaagatagggttggtgtttagggttgtttggttttagggtttgagaatttagttttttttttaggttatttcgtgttttgtgatgagtgtttattgagtatttgttgggggtggagatagggtttagtatttgtggaggttgaattttttgttttagggagttaagtatagtgggaggtgtagttttgggtagtttgggtagtagacggtaggtagagttaaggggtgtttcggtagagagttttgggagtcgtgaggtggggagatcgcgttttttaattggggaagtttgttaggttagggaagttcggggaggaggagaggtttaatttgggatttagatatatatatgtgtggggtaaggtttagatatatatatgtgtggggataggggattgaattttagtattttaggaaattttggttttattgtagttgtgtgaataggagtagaagagtagatggagtagagaggtttttgagtgttaggttgagggttaggggttttgatgtaggtagggtttggtatcggtatatattgttataggttgggtgagataaagttattattttttgtgtaggttttttggagcgaagtaaatttagttttggttaagaaagtaggaagggtagggaagttgaggacgttatatttgtttgtttttttttggggtttttttacggatattgtttgtttgggtttatagcgtgtattatttatttgtttttatttttattagagagtatgggatagttttgtttgaattttgaagaagtttagagtttttttagatcggagggttttattttttgtttttataatatgtgttagaggttaggggttattttatagatttggttttgttatttt

SEQ ID NO: 85 - DNA, 935 bp, homo sapiens
tgagttagatttagaggggaaaaaaatttgtttaaaatgtatagttaataagttagtaaggaataaagatagggttggtgtttagggttgtttggttttagggtttgagaatttagttttttttttaggttattttgtgttttgtgatgagtgtttattgagtatttgttgggggtggagatagggtttagtatttgtggaggttgaattttttgttttagggagttaagtatagtgggaggtgtagttttgggtagtttgggtagtagatggtaggtagagttaaggggtgttttggtagagagttttgggagttgtgaggtggggagattgtgttttttaattggggaagtttgttaggttagggaagtttggggaggaggagaggtttaatttgggatttagatatatatatgtgtggggtaaggtttagatatatatatgtgtggggataggggattgaattttagtattttaggaaattttggttttattgtagttgtgtgaataggagtagaagagtagatggagtagagaggtttttgagtgttaggttgagggttaggggttttgatgtaggtagggtttggtattggtatatattgttataggttgggtgagataaagttattattttttgtgtaggttttttggagtgaagtaaatttagttttggttaagaaagtaggaagggtagggaagttgaggatgttatatttgtttgtttttttttggggtttttttatggatattgtttgtttgggtttatagtgtgtattatttatttgtttttatttttattagagagtatgggatagttttgtttgaattttgaagaagtttagagtttttttagattggagggttttattttttgtttttataatatgtgttagaggttaggggttattttatagatttggttttgttatttt

SEQ ID NO: 86 - DNA, 1924 bp, homo sapiens
aatcgtgacaaccaaaggaacagcaggccaggccgggaatggcctggaggtggggagggatgcgctagggtgggacaggcctggcggagatgaggaaaggccaggaactgctcagttggctccaatgtaccaggaaaactggccaggcaggggacagagggagggggcaagaagctacactctgtctggcactgtagcaggcaggtcagacagtaagatgcattccaaatgcaggtctggggagctcaggagagaatgggaggagaaggggtacaggcggggcagaactgctgcacagccagtcaggttctcggggtgccaagctctggaaggcgcaaggctgcctagtgcccctgtctggcctgggctctgggctgagccttgctgcttctgctcctcttgacctggtcaaagggccctgcccttctcagcccaagcttcccccgggacaaatcatggctcaagtgaaacttcagttcctttccagcctggcgttaggtggtgtggtctagggcaggctgcttcctcctttgaggatggccactctgtcccttccaccagactcaaggctctgccctgctgcagccccctccccagagacaggcatggaggctgcacaacaggactgaacctggtggcttctcagacactgctcccacagtctgaaaagcttagagtcagcatggggagaggagcaggcttgggctggagacgggacccaggcaatcacatggaccagttctccctggcaggccaggaacagggacatccttagggaggagagtggccctggagccaatgtgggaaggagaagaggaaggcggcagggactggcagccagccaggcctccttgtcacccacagcaggaagggggaggtgagaagaggactgcaggactgagctaagtggctcagaacaccgaaagcagggggtgtgtgtgcgggcaaacatatgcgtagggccacaggatgggtggggctgctgggtcccctctccaaccgcctccctgggtgccttccactcacagagacccacctgaagcctggcctctgcacccctgaaaagcccctcccccctggggagcatcccactctgggggtgctcctcttctcaccctttcctcagatttgggaggtagtggtatcattaagaatgcaagccctacagccagactgccagggttcagttcctggctctgcatttcctgtgtgtccttgggcaagttatttagccttgctgtgcctcagttttctcatctgcaaaatgggaataatcatagttgataagggtttaatgagcaatacaaatacagcgtacagcacagagcccaggacaggctgaaacatgagtgttctctccacttgcctgaccagcacagaaccccgtcagcttcccatagaactgaggcctaagaggatgtctgcctcccactctccctgcaggccaaggatgtttaggcagataaggggtggtctcctagctgcctaggcccacctccacagctccaggctgggggaagagtgtccagtcttcacaatgagacagagtctgcattcaagtcctgcctcagcccctacgcagctgtgtgaccttggacacataacccagtatgtgtgagcctccactgcctcacctacaaaacaggttcataatgatgctcactgcacaggaggccatgaggacgaggtctgcggaatgcctggcaccaaggaactcctctgaatggctgctggttttgctgcctggtccatagtaggtgcccatcaatgtcagtttccttcatcaggtccagtagactgactctcaccacgcccgttcacctgcccctcaacttccctttccgcaagggtcacaaagtttgaggtcaaactatggggcctcagggtctctccattccagaacggagacacctcagctatagga

SEQ ID NO: 87 - DNA, 1924 bp, homo sapiens
aatcgtgataattaaaggaatagtaggttaggtcgggaatggtttggaggtggggagggatgcgttagggtgggataggtttggcggagatgaggaaaggttaggaattgtttagttggttttaatgtattaggaaaattggttaggtaggggatagagggagggggtaagaagttatattttgtttggtattgtagtaggtaggttagatagtaagatgtattttaaatgtaggtttggggagtttaggagagaatgggaggagaaggggtataggcggggtagaattgttgtatagttagttaggttttcggggtgttaagttttggaaggcgtaaggttgtttagtgtttttgtttggtttgggttttgggttgagttttgttgtttttgttttttttgatttggttaaagggttttgttttttttagtttaagtttttttcgggataaattatggtttaagtgaaattttagtttttttttagtttggcgttaggtggtgtggtttagggtaggttgtttttttttttgaggatggttattttgttttttttattagatttaaggttttgttttgttgtagttttttttttagagataggtatggaggttgtataataggattgaatttggtggttttttagatattgtttttatagtttgaaaagtttagagttagtatggggagaggagtaggtttgggttggagacgggatttaggtaattatatggattagttttttttggtaggttaggaatagggatatttttagggaggagagtggttttggagttaatgtgggaaggagaagaggaaggcggtagggattggtagttagttaggtttttttgttatttatagtaggaagggggaggtgagaagaggattgtaggattgagttaagtggtttagaatatcgaaagtagggggtgtgtgtgcgggtaaatatatgcgtagggttataggatgggtggggttgttgggttttttttttaatcgtttttttgggtgttttttatttatagagatttatttgaagtttggtttttgtatttttgaaaagttttttttttttggggagtattttattttgggggtgtttttttttttattttttttttagatttgggaggtagtggtattattaagaatgtaagttttatagttagattgttagggtttagtttttggttttgtattttttgtgtgtttttgggtaagttatttagttttgttgtgttttagtttttttatttgtaaaatgggaataattatagttgataagggtttaatgagtaatataaatatagcgtatagtatagagtttaggataggttgaaatatgagtgttttttttatttgtttgattagtatagaatttcgttagttttttatagaattgaggtttaagaggatgtttgttttttattttttttgtaggttaaggatgtttaggtagataaggggtggttttttagttgtttaggtttatttttatagttttaggttgggggaagagtgtttagtttttataatgagatagagtttgtatttaagttttgttttagtttttacgtagttgtgtgattttggatatataatttagtatgtgtgagtttttattgttttatttataaaataggtttataatgatgtttattgtataggaggttatgaggacgaggtttgcggaatgtttggtattaaggaatttttttgaatggttgttggttttgttgtttggtttatagtaggtgtttattaatgttagttttttttattaggtttagtagattgatttttattacgttcgtttatttgttttttaattttttttttcgtaagggttataaagtttgaggttaaattatggggttttagggtttttttattttagaacggagatattttagttatagga

SEQ ID NO: 88 - DNA, 1924 bp, homo sapiens
aattgtgataattaaaggaatagtaggttaggttgggaatggtttggaggtggggagggatgtgttagggtgggataggtttggtggagatgaggaaaggttaggaattgtttagttggttttaatgtattaggaaaattggttaggtaggggatagagggagggggtaagaagttatattttgtttggtattgtagtaggtaggttagatagtaagatgtattttaaatgtaggtttggggagtttaggagagaatgggaggagaaggggtataggtggggtagaattgttgtatagttagttaggtttttggggtgttaagttttggaaggtgtaaggttgtttagtgtttttgtttggtttgggttttgggttgagttttgttgtttttgttttttttgatttggttaaagggttttgttttttttagtttaagttttttttgggataaattatggtttaagtgaaattttagtttttttttagtttggtgttaggtggtgtggtttagggtaggttgtttttttttttgaggatggttattttgttttttttattagatttaaggttttgttttgttgtagttttttttttagagataggtatggaggttgtataataggattgaatttggtggttttttagatattgtttttatagtttgaaaagtttagagttagtatggggagaggagtaggtttgggttggagatgggatttaggtaattatatggattagttttttttggtaggttaggaatagggatatttttagggaggagagtggttttggagttaatgtgggaaggagaagaggaaggtggtagggattggtagttagttaggtttttttgttatttatagtaggaagggggaggtgagaagaggattgtaggattgagttaagtggtttagaatattgaaagtagggggtgtgtgtgtgggtaaatatatgtgtagggttataggatgggtggggttgttgggttttttttttaattgtttttttgggtgttttttatttatagagatttatttgaagtttggtttttgtatttttgaaaagttttttttttttggggagtattttattttgggggtgtttttttttttattttttttttagatttgggaggtagtggtattattaagaatgtaagttttatagttagattgttagggtttagtttttggttttgtattttttgtgtgtttttgggtaagttatttagttttgttgtgttttagtttttttatttgtaaaatgggaataattatagttgataagggtttaatgagtaatataaatatagtgtatagtatagagtttaggataggttgaaatatgagtgttttttttatttgtttgattagtatagaattttgttagttttttatagaattgaggtttaagaggatgtttgttttttattttttttgtaggttaaggatgtttaggtagataaggggtggttttttagttgtttaggtttatttttatagttttaggttgggggaagagtgtttagtttttataatgagatagagtttgtatttaagttttgttttagtttttatgtagttgtgtgattttggatatataatttagtatgtgtgagtttttattgttttatttataaaataggtttataatgatgtttattgtataggaggttatgaggatgaggtttgtggaatgtttggtattaaggaatttttttgaatggttgttggttttgttgtttggtttatagtaggtgtttattaatgttagttttttttattaggtttagtagattgatttttattatgtttgtttatttgttttttaatttttttttttgtaagggttataaagtttgaggttaaattatggggttttagggtttttttattttagaatggagatattttagttatagga

SEQ ID NO: 89 - DNA, 1924 bp, homo sapiens
ttttatagttgaggtgttttcgttttggaatggagagattttgaggttttatagtttgattttaaattttgtgatttttgcggaaagggaagttgaggggtaggtgaacgggcgtggtgagagttagtttattggatttgatgaaggaaattgatattgatgggtatttattatggattaggtagtaaaattagtagttatttagaggagttttttggtgttaggtatttcgtagatttcgtttttatggttttttgtgtagtgagtattattatgaatttgttttgtaggtgaggtagtggaggtttatatatattgggttatgtgtttaaggttatatagttgcgtaggggttgaggtaggatttgaatgtagattttgttttattgtgaagattggatattttttttttagtttggagttgtggaggtgggtttaggtagttaggagattattttttatttgtttaaatatttttggtttgtagggagagtgggaggtagatatttttttaggttttagttttatgggaagttgacggggttttgtgttggttaggtaagtggagagaatatttatgttttagtttgttttgggttttgtgttgtacgttgtatttgtattgtttattaaatttttattaattatgattatttttattttgtagatgagaaaattgaggtatagtaaggttaaataatttgtttaaggatatataggaaatgtagagttaggaattgaattttggtagtttggttgtagggtttgtatttttaatgatattattattttttaaatttgaggaaagggtgagaagaggagtatttttagagtgggatgttttttaggggggaggggttttttaggggtgtagaggttaggttttaggtgggtttttgtgagtggaaggtatttagggaggcggttggagaggggatttagtagttttatttattttgtggttttacgtatatgtttgttcgtatatatattttttgttttcggtgttttgagttatttagtttagttttgtagttttttttttatttttttttttttgttgtgggtgataaggaggtttggttggttgttagtttttgtcgtttttttttttttttttttatattggttttagggttatttttttttttaaggatgtttttgtttttggtttgttagggagaattggtttatgtgattgtttgggtttcgtttttagtttaagtttgtttttttttttatgttgattttaagttttttagattgtgggagtagtgtttgagaagttattaggtttagttttgttgtgtagtttttatgtttgtttttggggagggggttgtagtagggtagagttttgagtttggtggaagggatagagtggttatttttaaaggaggaagtagtttgttttagattatattatttaacgttaggttggaaaggaattgaagttttatttgagttatgatttgtttcgggggaagtttgggttgagaagggtagggttttttgattaggttaagaggagtagaagtagtaaggtttagtttagagtttaggttagataggggtattaggtagttttgcgttttttagagtttggtatttcgagaatttgattggttgtgtagtagttttgtttcgtttgtattttttttttttttatttttttttgagttttttagatttgtatttggaatgtattttattgtttgatttgtttgttatagtgttagatagagtgtagttttttgttttttttttttgttttttgtttggttagtttttttggtatattggagttaattgagtagtttttggtttttttttattttcgttaggtttgttttattttagcgtatttttttttatttttaggttattttcggtttggtttgttgtttttttggttgttacgatt

SEQ ID NO: 90 - DNA, 1924 bp, homo sapiens
ttttatagttgaggtgtttttgttttggaatggagagattttgaggttttatagtttgattttaaattttgtgatttttgtggaaagggaagttgaggggtaggtgaatgggtgtggtgagagttagtttattggatttgatgaaggaaattgatattgatgggtatttattatggattaggtagtaaaattagtagttatttagaggagttttttggtgttaggtattttgtagattttgtttttatggttttttgtgtagtgagtattattatgaatttgttttgtaggtgaggtagtggaggtttatatatattgggttatgtgtttaaggttatatagttgtgtaggggttgaggtaggatttgaatgtagattttgttttattgtgaagattggatattttttttttagtttggagttgtggaggtgggtttaggtagttaggagattattttttatttgtttaaatatttttggtttgtagggagagtgggaggtagatatttttttaggttttagttttatgggaagttgatggggttttgtgttggttaggtaagtggagagaatatttatgttttagtttgttttgggttttgtgttgtatgttgtatttgtattgtttattaaatttttattaattatgattatttttattttgtagatgagaaaattgaggtatagtaaggttaaataatttgtttaaggatatataggaaatgtagagttaggaattgaattttggtagtttggttgtagggtttgtatttttaatgatattattattttttaaatttgaggaaagggtgagaagaggagtatttttagagtgggatgttttttaggggggaggggttttttaggggtgtagaggttaggttttaggtgggtttttgtgagtggaaggtatttagggaggtggttggagaggggatttagtagttttatttattttgtggttttatgtatatgtttgtttgtatatatattttttgtttttggtgttttgagttatttagtttagttttgtagttttttttttatttttttttttttgttgtgggtgataaggaggtttggttggttgttagtttttgttgtttttttttttttttttttatattggttttagggttatttttttttttaaggatgtttttgtttttggtttgttagggagaattggtttatgtgattgtttgggttttgtttttagtttaagtttgtttttttttttatgttgattttaagttttttagattgtgggagtagtgtttgagaagttattaggtttagttttgttgtgtagtttttatgtttgtttttggggagggggttgtagtagggtagagttttgagtttggtggaagggatagagtggttatttttaaaggaggaagtagtttgttttagattatattatttaatgttaggttggaaaggaattgaagttttatttgagttatgatttgttttgggggaagtttgggttgagaagggtagggttttttgattaggttaagaggagtagaagtagtaaggtttagtttagagtttaggttagataggggtattaggtagttttgtgttttttagagtttggtattttgagaatttgattggttgtgtagtagttttgttttgtttgtattttttttttttttatttttttttgagttttttagatttgtatttggaatgtattttattgtttgatttgtttgttatagtgttagatagagtgtagttttttgttttttttttttgttttttgtttggttagtttttttggtatattggagttaattgagtagtttttggtttttttttatttttgttaggtttgttttattttagtgtatttttttttatttttaggttatttttggtttggtttgttgtttttttggttgttatgatt

SEQ ID NO: 91 - DNA, 2038 bp, homo sapiens
aaaagttttcagtatcaaaagaagctagcgcaggccacccgagtccctgaggttggagtcctagcatagctcccctccctcaaagagggacaaggggtcaggggcagagcaaaaatccagtctgcttcaaccacggagactgcctttgggatggaaagtttctggagctccctccattctattcctgtggggcaggaacatgccagggctgctggtaaatggcaggggtcacctttaccagggcgcaggcatagtgtggcccctgcctgccctggggccaccctggaacagtaagaccctctgggaagggaagaaaccagacccagccataagctttctccccttctccctcaaatcgccccttcctcctccccaaaatcaggctatggcaaaggggctggcagcaggggaatggaggttttggaggggaaggccagccatgcgaaggcaaggagaaaaggaggatggagagagccccagccatccccattttccttcctctgcctccgaggggctgcttctggagggcactgttgtgtggggaccctgtgaggtttgcaggaggcgggcaaaggggcaccagacagggaacatgcacacaggcagcctggccatggagagctcctggctgtccgcccaggtggcgccttgggcagagctggcgctccacaagtgattattgatggtgacaggattccctcatcctgctccaacctctcaactgtggacacattcaccggcagtcactcatctcacatgcccaccagcacgcgcacacacgttcccctaacccacgctaacacacccaccccctgcacacacacactttgaagccacacctcttccccgacaacacccgtctccacactgcgcacctaggcctgagctcacacacacccaggcccatgctcacggccctgtcacctatgcactcagcctggcccacactcccgacacacggtggcaggctctcaaccagacagcagcacaggatccttgccctgggcttgctggagccctggccctgaaagggagtatggtgaggcctcctgggaacctggctagggcaatggtcagggtgaaactccttcccaatcccagcagcttggtccctcaagatcccatggggagaatcgccgtgaaccttggctggccaaagaacaagcatccagcaccacctagtggtgtcctggaggagggtggggggtggtaacagaaggggaccccctgtatccctaaggcctgtggtccctggtctcccaggtagacagagggcttcaggacccagccaggcagctggggatgtggggaggaggctgatggggaggaaacaggcagctgtcctcccggtagagctaagagcacactcagttccaccccagttcagctccaggaggtagaggggctgcccactctcgagtcccagatgctgggaggccttccctagaacagactccaaggctggtgagggccaacagggggtgggctggccacatgattctgggcccacatccttcatgtccaagttcaagaagttgaaaagagaaaatcatctcaagggttgaggggagaagggaggccagcagggcgggggcaggatccccactggggcagactcgctccaaggtcttcagtccagcttgaacttgtcctctgattccttcagcaggtacaggctgtcatcttccagaaagctgtgggccaaaggagtagcccattgaggcacacagctctgacagctcgcatggagacaagggtggggtgcatgcaggcaaggtgggagggggcggatgggcacacagagcccccaatctcccctaaggagtgggcaaggaagggtccaaagaaggtgagcaccaggcagggggcagcacccacctgaaaaagaggacgtggacagggatggtgctgatgtgccagatggcatgggcatccaggacccagaagagcggtgggaagtcaagcagctcgagcagggacagcccctgcagcagcaagaccaccaccacgcacttgcgcacgtgaggcagccgccgct

SEQ ID NO: 92 - DNA, 2038 bp, homo sapiens
aaaagtttttagtattaaaagaagttagcgtaggttattcgagtttttgaggttggagttttagtatagttttttttttttaaagagggataaggggttaggggtagagtaaaaatttagtttgttttaattacggagattgtttttgggatggaaagtttttggagttttttttattttatttttgtggggtaggaatatgttagggttgttggtaaatggtaggggttatttttattagggcgtaggtatagtgtggtttttgtttgttttggggttattttggaatagtaagattttttgggaagggaagaaattagatttagttataagtttttttttttttttttttaaatcgttttttttttttttttaaaattaggttatggtaaaggggttggtagtaggggaatggaggttttggaggggaaggttagttatgcgaaggtaaggagaaaaggaggatggagagagttttagttatttttatttttttttttttgttttcgaggggttgtttttggagggtattgttgtgtggggattttgtgaggtttgtaggaggcgggtaaaggggtattagatagggaatatgtatataggtagtttggttatggagagtttttggttgttcgtttaggtggcgttttgggtagagttggcgttttataagtgattattgatggtgataggatttttttattttgttttaattttttaattgtggatatatttatcggtagttatttattttatatgtttattagtacgcgtatatacgtttttttaatttacgttaatatatttattttttgtatatatatattttgaagttatatttttttttcgataatattcgtttttatattgcgtatttaggtttgagtttatatatatttaggtttatgtttacggttttgttatttatgtatttagtttggtttatattttcgatatacggtggtaggtttttaattagatagtagtataggatttttgttttgggtttgttggagttttggttttgaaagggagtatggtgaggttttttgggaatttggttagggtaatggttagggtgaaatttttttttaattttagtagtttggttttttaagattttatggggagaatcgtcgtgaattttggttggttaaagaataagtatttagtattatttagtggtgttttggaggagggtggggggtggtaatagaaggggattttttgtatttttaaggtttgtggtttttggttttttaggtagatagagggttttaggatttagttaggtagttggggatgtggggaggaggttgatggggaggaaataggtagttgttttttcggtagagttaagagtatatttagttttattttagtttagttttaggaggtagaggggttgtttattttcgagttttagatgttgggaggttttttttagaatagattttaaggttggtgagggttaatagggggtgggttggttatatgattttgggtttatattttttatgtttaagtttaagaagttgaaaagagaaaattattttaagggttgaggggagaagggaggttagtagggcgggggtaggatttttattggggtagattcgttttaaggtttttagtttagtttgaatttgttttttgatttttttagtaggtataggttgttattttttagaaagttgtgggttaaaggagtagtttattgaggtatatagttttgatagttcgtatggagataagggtggggtgtatgtaggtaaggtgggagggggcggatgggtatatagagtttttaattttttttaaggagtgggtaaggaagggtttaaagaaggtgagtattaggtagggggtagtatttatttgaaaaagaggacgtggatagggatggtgttgatgtgttagatggtatgggtatttaggatttagaagagcggtgggaagttaagtagttcgagtagggatagtttttgtagtagtaagattattattacgtatttgcgtacgtgaggtagtcgtcgtt

SEQ ID NO: 93 - DNA, 2038 bp, homo sapiens
aaaagtttttagtattaaaagaagttagtgtaggttatttgagtttttgaggttggagttttagtatagttttttttttttaaagagggataaggggttaggggtagagtaaaaatttagtttgttttaattatggagattgtttttgggatggaaagtttttggagttttttttattttatttttgtggggtaggaatatgttagggttgttggtaaatggtaggggttatttttattagggtgtaggtatagtgtggtttttgtttgttttggggttattttggaatagtaagattttttgggaagggaagaaattagatttagttataagtttttttttttttttttttaaattgttttttttttttttttaaaattaggttatggtaaaggggttggtagtaggggaatggaggttttggaggggaaggttagttatgtgaaggtaaggagaaaaggaggatggagagagttttagttatttttatttttttttttttgtttttgaggggttgtttttggagggtattgttgtgtggggattttgtgaggtttgtaggaggtgggtaaaggggtattagatagggaatatgtatataggtagtttggttatggagagtttttggttgtttgtttaggtggtgttttgggtagagttggtgttttataagtgattattgatggtgataggatttttttattttgttttaattttttaattgtggatatatttattggtagttatttattttatatgtttattagtatgtgtatatatgtttttttaatttatgttaatatatttattttttgtatatatatattttgaagttatattttttttttgataatatttgtttttatattgtgtatttaggtttgagtttatatatatttaggtttatgtttatggttttgttatttatgtatttagtttggtttatatttttgatatatggtggtaggtttttaattagatagtagtataggatttttgttttgggtttgttggagttttggttttgaaagggagtatggtgaggttttttgggaatttggttagggtaatggttagggtgaaatttttttttaattttagtagtttggttttttaagattttatggggagaattgttgtgaattttggttggttaaagaataagtatttagtattatttagtggtgttttggaggagggtggggggtggtaatagaaggggattttttgtatttttaaggtttgtggtttttggttttttaggtagatagagggttttaggatttagttaggtagttggggatgtggggaggaggttgatggggaggaaataggtagttgtttttttggtagagttaagagtatatttagttttattttagtttagttttaggaggtagaggggttgtttatttttgagttttagatgttgggaggttttttttagaatagattttaaggttggtgagggttaatagggggtgggttggttatatgattttgggtttatattttttatgtttaagtttaagaagttgaaaagagaaaattattttaagggttgaggggagaagggaggttagtagggtgggggtaggatttttattggggtagatttgttttaaggtttttagtttagtttgaatttgttttttgatttttttagtaggtataggttgttattttttagaaagttgtgggttaaaggagtagtttattgaggtatatagttttgatagtttgtatggagataagggtggggtgtatgtaggtaaggtgggagggggtggatgggtatatagagtttttaattttttttaaggagtgggtaaggaagggtttaaagaaggtgagtattaggtagggggtagtatttatttgaaaaagaggatgtggatagggatggtgttgatgtgttagatggtatgggtatttaggatttagaagagtggtgggaagttaagtagtttgagtagggatagtttttgtagtagtaagattattattatgtatttgtgtatgtgaggtagttgttgtt

SEQ ID NO: 94 - DNA, 2038 bp, homo sapiens
agcggcggttgttttacgtgcgtaagtgcgtggtggtggttttgttgttgtaggggttgtttttgttcgagttgtttgattttttatcgtttttttgggttttggatgtttatgttatttggtatattagtattatttttgtttacgtttttttttttaggtgggtgttgttttttgtttggtgtttattttttttggatttttttttgtttattttttaggggagattgggggttttgtgtgtttattcgtttttttttattttgtttgtatgtattttatttttgtttttatgcgagttgttagagttgtgtgttttaatgggttatttttttggtttatagttttttggaagatgatagtttgtatttgttgaaggaattagaggataagtttaagttggattgaagattttggagcgagtttgttttagtggggattttgttttcgttttgttggttttttttttttttttaatttttgagatgattttttttttttaattttttgaatttggatatgaaggatgtgggtttagaattatgtggttagtttattttttgttggtttttattagttttggagtttgttttagggaaggttttttagtatttgggattcgagagtgggtagtttttttattttttggagttgaattggggtggaattgagtgtgtttttagttttatcgggaggatagttgtttgttttttttttattagttttttttttatatttttagttgtttggttgggttttgaagttttttgtttatttgggagattagggattataggttttagggatatagggggtttttttttgttattattttttatttttttttaggatattattaggtggtgttggatgtttgttttttggttagttaaggtttacggcgattttttttatgggattttgagggattaagttgttgggattgggaaggagttttattttgattattgttttagttaggtttttaggaggttttattatatttttttttagggttagggttttagtaagtttagggtaaggattttgtgttgttgtttggttgagagtttgttatcgtgtgtcgggagtgtgggttaggttgagtgtataggtgatagggtcgtgagtatgggtttgggtgtgtgtgagtttaggtttaggtgcgtagtgtggagacgggtgttgtcggggaagaggtgtggttttaaagtgtgtgtgtgtagggggtgggtgtgttagcgtgggttaggggaacgtgtgtgcgcgtgttggtgggtatgtgagatgagtgattgtcggtgaatgtgtttatagttgagaggttggagtaggatgagggaattttgttattattaataattatttgtggagcgttagttttgtttaaggcgttatttgggcggatagttaggagttttttatggttaggttgtttgtgtgtatgttttttgtttggtgtttttttgttcgttttttgtaaattttatagggtttttatataatagtgttttttagaagtagtttttcggaggtagaggaaggaaaatggggatggttggggttttttttattttttttttttttttgttttcgtatggttggtttttttttttaaaatttttatttttttgttgttagtttttttgttatagtttgattttggggaggaggaaggggcgatttgagggagaaggggagaaagtttatggttgggtttggttttttttttttttagagggttttattgttttagggtggttttagggtaggtaggggttatattatgtttgcgttttggtaaaggtgatttttgttatttattagtagttttggtatgtttttgttttataggaatagaatggagggagttttagaaattttttattttaaaggtagttttcgtggttgaagtagattggatttttgttttgtttttgattttttgtttttttttgagggaggggagttatgttaggattttaattttagggattcgggtggtttgcgttagttttttttgatattgaaaattttt

SEQ ID NO: 95 - DNA, 2038 bp, homo sapiens
agtggtggttgttttatgtgtgtaagtgtgtggtggtggttttgttgttgtaggggttgtttttgtttgagttgtttgattttttattgtttttttgggttttggatgtttatgttatttggtatattagtattatttttgtttatgtttttttttttaggtgggtgttgttttttgtttggtgtttattttttttggatttttttttgtttattttttaggggagattgggggttttgtgtgtttatttgtttttttttattttgtttgtatgtattttatttttgtttttatgtgagttgttagagttgtgtgttttaatgggttatttttttggtttatagttttttggaagatgatagtttgtatttgttgaaggaattagaggataagtttaagttggattgaagattttggagtgagtttgttttagtggggattttgtttttgttttgttggttttttttttttttttaatttttgagatgattttttttttttaattttttgaatttggatatgaaggatgtgggtttagaattatgtggttagtttattttttgttggtttttattagttttggagtttgttttagggaaggttttttagtatttgggatttgagagtgggtagtttttttattttttggagttgaattggggtggaattgagtgtgtttttagttttattgggaggatagttgtttgttttttttttattagttttttttttatatttttagttgtttggttgggttttgaagttttttgtttatttgggagattagggattataggttttagggatatagggggtttttttttgttattattttttatttttttttaggatattattaggtggtgttggatgtttgttttttggttagttaaggtttatggtgattttttttatgggattttgagggattaagttgttgggattgggaaggagttttattttgattattgttttagttaggtttttaggaggttttattatatttttttttagggttagggttttagtaagtttagggtaaggattttgtgttgttgtttggttgagagtttgttattgtgtgttgggagtgtgggttaggttgagtgtataggtgatagggttgtgagtatgggtttgggtgtgtgtgagtttaggtttaggtgtgtagtgtggagatgggtgttgttggggaagaggtgtggttttaaagtgtgtgtgtgtagggggtgggtgtgttagtgtgggttaggggaatgtgtgtgtgtgtgttggtgggtatgtgagatgagtgattgttggtgaatgtgtttatagttgagaggttggagtaggatgagggaattttgttattattaataattatttgtggagtgttagttttgtttaaggtgttatttgggtggatagttaggagttttttatggttaggttgtttgtgtgtatgttttttgtttggtgtttttttgtttgttttttgtaaattttatagggtttttatataatagtgttttttagaagtagttttttggaggtagaggaaggaaaatggggatggttggggttttttttattttttttttttttttgtttttgtatggttggtttttttttttaaaatttttatttttttgttgttagtttttttgttatagtttgattttggggaggaggaaggggtgatttgagggagaaggggagaaagtttatggttgggtttggttttttttttttttagagggttttattgttttagggtggttttagggtaggtaggggttatattatgtttgtgttttggtaaaggtgatttttgttatttattagtagttttggtatgtttttgttttataggaatagaatggagggagttttagaaattttttattttaaaggtagtttttgtggttgaagtagattggatttttgttttgtttttgattttttgtttttttttgagggaggggagttatgttaggattttaattttagggatttgggtggtttgtgttagttttttttgatattgaaaattttt

SEQ ID NO: 96 - DNA, 50 bp, homo sapiens
taaggctctcatcaccttaggggcttcactcacattcataagagacctcg

SEQ ID NO: 97 - DNA, 50 bp, homo sapiens
taaggtttttattattttaggggttttatttatatttataagagatttcg

SEQ ID NO: 98 - DNA, 50 bp, homo sapiens
taaggtttttattattttaggggttttatttatatttataagagattttg

SEQ ID NO: 99 - DNA, 50 bp, homo sapiens
cgaggttttttatgaatgtgagtgaagtttttaaggtgatgagagtttta

SEQ ID NO: 100 - DNA, 50 bp, homo sapiens
tgaggttttttatgaatgtgagtgaagtttttaaggtgatgagagtttta

SEQ ID NO: 101 - DNA, 3001 bp, homo sapiens
tgagcaattagagatattcgtcttttttttgtttgtttttttgagacagttttgtttttgttgcccaggctggagtgcaatggtgcgatctcggttcactgcaacctccgcctcctgggttcaagcgattctcctgcctcaggctcccgagtagctgggattacaggcatgcaccaccacacccaactaattttgtatttttagtagagatggggtttctccatgttggtcagggtggtcttgaactcccaacctcaggttatctgcctgcctctgccacctaaagtgcggggattgcaggcacgagccaccgcacccggcattttttttttttttttttttttgagacagggtctcgctctttcatccaggctggagtgcagtggggagagcatggctcaccacagccttgacctcctgggctcaaacgatcctcccacctcagcctcccaagtagcgagaccacaatgtctggctaattcttttattttttgtagagaaggcatcttgtcatgttgcctaggctagtcttgaactccagggctcagatgatctttctaccttggcagacatttcctctccttttgctcaagtccatcaagatgttggcatctgatgaactcatctatggaaacctgggtttatatttgtccttcctgaatataggatttgctcttactctcctggaaggagttcttgctatcttactcccttcctatgaaaatgaagcccaaattcttcaacctgacttttgaggctccaaattgcctttccaaccgtattggtcactactcctgttcatgtaccctgctccctgagtaaataaagctcctggatgtgcccacatctgcccagggcatccattctctctgttccctctgtctggaatgcaaagtggtataatagtaaagaggacaagcttgtggtcaaacaggccagaactggaaactccactttactacatactggctgtgtgaccttgggcagggcatttaatctctctaatccccatctgtaaaactgggattagagaaactatctcaaagggtgtgataaaaattacttgacatattgtgacacctgtcacacagtgagtgctcaatacgttggttctttgcccactatggtccaaatcgaatgtaccagtccaaagtccctccttcaaacaaaacgttccaagatgatccctgcccccacgtcttcaaagccggaactgacaccttcctatcccaaatgcttcctaatcaaagagtctttcaggggctcaaatcattctctgccttgcacttgaaaaggctcatgtccccgtggggactgtgagtcccaatgggcgggaccctggtctgatttctgtgccattcctagacattgtggcccgaatgtatttaataaatacccttttgactgaacaaataagtaaatgaaagcttctgggaaagtaagagaggctggtaaggctctcatcaccttaggggcttcactcacattcataagagacctcgtggggaaactaaggttcagggattgcagaggcgtattgggggcgcagggggcgggagcaagacaaatgggcggggcttaccgtgggggtggggcttacctgctagactcatgtagattggctggcgggagcggaagtgattcagagcgcccccagagcagttctgctcttcgcactgcagtacgcagtcgcggtacaccggctcacggtcgccctgggagccgctcgccagcgccgctgccccagctagcaggaccaaccgcgccgccaggccggccatcctttctccctggctcgccgccgggggaggagcttaggagtatgaagcttccacttccggagtaaccggaagttcctgtgttctttattctactctccgctgaagtccacacagtttaaattaaagttcccggatttttgtgggcgcctgccccgcccctcgtccccctgctgtgtccatatatcgaggcgatagggttaagggaaggcggacgcctgatgggttaatgagcaaactgaagtgttttccatgatcttttttgaggtagggctgtttactgtcaccacccctgtcggattttacttcctaaacgtacctgtaactatccacttctctccatctcttctggcaccaccctggttaaagacaccatcatgtgtcgccaagacagccgcagtagcttcttaatggctctccctgcctctacttttgcctcttccaacctgcgctccattttgaaaaattaaaatttgcccatatcactttttttttcttaaaattatttactggctcccaattaccttgggtaaaatacagtctccacaaaccctgcctgatttggcccctgtccactggtctccctcactcccttgctccagacccgcttcagagggctatgtccctcaagcttcctgactgcctggcctggtctgaatcactcactcttcttttttcttctagtcgcaattgaagtaccacctcccgagggtgattgcttccccatgcggggtagaacctttgctgtcctgttcaccactctacctccagcacagaatttggcttatggtaggcgctaactgcgtttgtttgttcttctgtttaatgaatgaacagcatacatcaacataagaacttgacaaatccagggctgtaaaatcatcagtatggttctgcactgagatcggagagaagtaatatttctaggaaaattaggaaccctgggaacaggacgcttgctttagtatcctctccctgctcacctcccctgcactcccatcagcaccgacccacacccaatctcatagaagccttgtagctaaggatcaccctttctcctcccccactctcctcaccccttgtcaacttttctttttcgtcctgggggttggaatgagtaagaagtagcctgggattccattcactcacttaacaaacatttctgagtccttagctctagcaccttgctaagcaaggcaaaatctccaggaggcaccattcac

SEQ ID NO: 102 - DNA, 3001 bp, homo sapiens
tgagtaattagagatattcgttttttttttgtttgtttttttgagatagttttgtttttgttgtttaggttggagtgtaatggtgcgatttcggtttattgtaattttcgttttttgggtttaagcgatttttttgttttaggttttcgagtagttgggattataggtatgtattattatatttaattaattttgtatttttagtagagatggggtttttttatgttggttagggtggttttgaatttttaattttaggttatttgtttgtttttgttatttaaagtgcggggattgtaggtacgagttatcgtattcggtattttttttttttttttttttttgagatagggtttcgtttttttatttaggttggagtgtagtggggagagtatggtttattatagttttgattttttgggtttaaacgatttttttattttagttttttaagtagcgagattataatgtttggttaatttttttattttttgtagagaaggtattttgttatgttgtttaggttagttttgaattttagggtttagatgatttttttattttggtagatattttttttttttttgtttaagtttattaagatgttggtatttgatgaatttatttatggaaatttgggtttatatttgttttttttgaatataggatttgtttttatttttttggaaggagtttttgttattttattttttttttatgaaaatgaagtttaaattttttaatttgatttttgaggttttaaattgtttttttaatcgtattggttattatttttgtttatgtattttgttttttgagtaaataaagtttttggatgtgtttatatttgtttagggtatttattttttttgttttttttgtttggaatgtaaagtggtataatagtaaagaggataagtttgtggttaaataggttagaattggaaattttattttattatatattggttgtgtgattttgggtagggtatttaatttttttaatttttatttgtaaaattgggattagagaaattattttaaagggtgtgataaaaattatttgatatattgtgatatttgttatatagtgagtgtttaatacgttggttttttgtttattatggtttaaatcgaatgtattagtttaaagttttttttttaaataaaacgttttaagatgatttttgtttttacgtttttaaagtcggaattgatatttttttattttaaatgttttttaattaaagagttttttaggggtttaaattattttttgttttgtatttgaaaaggtttatgttttcgtggggattgtgagttttaatgggcgggattttggtttgatttttgtgttatttttagatattgtggttcgaatgtatttaataaatatttttttgattgaataaataagtaaatgaaagtttttgggaaagtaagagaggttggtaaggtttttattattttaggggttttatttatatttataagagatttcgtggggaaattaaggtttagggattgtagaggcgtattgggggcgtagggggcgggagtaagataaatgggcggggtttatcgtgggggtggggtttatttgttagatttatgtagattggttggcgggagcggaagtgatttagagcgtttttagagtagttttgtttttcgtattgtagtacgtagtcgcggtatatcggtttacggtcgttttgggagtcgttcgttagcgtcgttgttttagttagtaggattaatcgcgtcgttaggtcggttattttttttttttggttcgtcgtcgggggaggagtttaggagtatgaagtttttattttcggagtaatcggaagtttttgtgttttttattttatttttcgttgaagtttatatagtttaaattaaagttttcggatttttgtgggcgtttgtttcgtttttcgtttttttgttgtgtttatatatcgaggcgatagggttaagggaaggcggacgtttgatgggttaatgagtaaattgaagtgttttttatgattttttttgaggtagggttgtttattgttattatttttgtcggattttattttttaaacgtatttgtaattatttatttttttttattttttttggtattattttggttaaagatattattatgtgtcgttaagatagtcgtagtagttttttaatggttttttttgtttttatttttgttttttttaatttgcgttttattttgaaaaattaaaatttgtttatattatttttttttttttaaaattatttattggtttttaattattttgggtaaaatatagtttttataaattttgtttgatttggtttttgtttattggttttttttatttttttgttttagattcgttttagagggttatgttttttaagttttttgattgtttggtttggtttgaattatttatttttttttttttttttagtcgtaattgaagtattatttttcgagggtgattgtttttttatgcggggtagaatttttgttgttttgtttattattttatttttagtatagaatttggtttatggtaggcgttaattgcgtttgtttgtttttttgtttaatgaatgaatagtatatattaatataagaatttgataaatttagggttgtaaaattattagtatggttttgtattgagatcggagagaagtaatatttttaggaaaattaggaattttgggaataggacgtttgttttagtattttttttttgtttattttttttgtatttttattagtatcgatttatatttaattttatagaagttttgtagttaaggattattttttttttttttttattttttttattttttgttaatttttttttttcgttttgggggttggaatgagtaagaagtagtttgggattttatttatttatttaataaatatttttgagtttttagttttagtattttgttaagtaaggtaaaatttttaggaggtattatttat

SEQ ID NO: 103 - DNA, 3001 bp, homo sapiens
tgagtaattagagatatttgttttttttttgtttgtttttttgagatagttttgtttttgttgtttaggttggagtgtaatggtgtgattttggtttattgtaatttttgttttttgggtttaagtgatttttttgttttaggtttttgagtagttgggattataggtatgtattattatatttaattaattttgtatttttagtagagatggggtttttttatgttggttagggtggttttgaatttttaattttaggttatttgtttgtttttgttatttaaagtgtggggattgtaggtatgagttattgtatttggtattttttttttttttttttttttgagatagggttttgtttttttatttaggttggagtgtagtggggagagtatggtttattatagttttgattttttgggtttaaatgatttttttattttagttttttaagtagtgagattataatgtttggttaatttttttattttttgtagagaaggtattttgttatgttgtttaggttagttttgaattttagggtttagatgatttttttattttggtagatattttttttttttttgtttaagtttattaagatgttggtatttgatgaatttatttatggaaatttgggtttatatttgttttttttgaatataggatttgtttttatttttttggaaggagtttttgttattttattttttttttatgaaaatgaagtttaaattttttaatttgatttttgaggttttaaattgtttttttaattgtattggttattatttttgtttatgtattttgttttttgagtaaataaagtttttggatgtgtttatatttgtttagggtatttattttttttgttttttttgtttggaatgtaaagtggtataatagtaaagaggataagtttgtggttaaataggttagaattggaaattttattttattatatattggttgtgtgattttgggtagggtatttaatttttttaatttttatttgtaaaattgggattagagaaattattttaaagggtgtgataaaaattatttgatatattgtgatatttgttatatagtgagtgtttaatatgttggttttttgtttattatggtttaaattgaatgtattagtttaaagttttttttttaaataaaatgttttaagatgatttttgtttttatgtttttaaagttggaattgatatttttttattttaaatgttttttaattaaagagttttttaggggtttaaattattttttgttttgtatttgaaaaggtttatgtttttgtggggattgtgagttttaatgggtgggattttggtttgatttttgtgttatttttagatattgtggtttgaatgtatttaataaatatttttttgattgaataaataagtaaatgaaagtttttgggaaagtaagagaggttggtaaggtttttattattttaggggttttatttatatttataagagattttgtggggaaattaaggtttagggattgtagaggtgtattgggggtgtagggggtgggagtaagataaatgggtggggtttattgtgggggtggggtttatttgttagatttatgtagattggttggtgggagtggaagtgatttagagtgtttttagagtagttttgttttttgtattgtagtatgtagttgtggtatattggtttatggttgttttgggagttgtttgttagtgttgttgttttagttagtaggattaattgtgttgttaggttggttattttttttttttggtttgttgttgggggaggagtttaggagtatgaagtttttatttttggagtaattggaagtttttgtgttttttattttattttttgttgaagtttatatagtttaaattaaagtttttggatttttgtgggtgtttgttttgttttttgtttttttgttgtgtttatatattgaggtgatagggttaagggaaggtggatgtttgatgggttaatgagtaaattgaagtgttttttatgattttttttgaggtagggttgtttattgttattatttttgttggattttattttttaaatgtatttgtaattatttatttttttttattttttttggtattattttggttaaagatattattatgtgttgttaagatagttgtagtagttttttaatggttttttttgtttttatttttgttttttttaatttgtgttttattttgaaaaattaaaatttgtttatattatttttttttttttaaaattatttattggtttttaattattttgggtaaaatatagtttttataaattttgtttgatttggtttttgtttattggttttttttatttttttgttttagatttgttttagagggttatgttttttaagttttttgattgtttggtttggtttgaattatttatttttttttttttttttagttgtaattgaagtattattttttgagggtgattgtttttttatgtggggtagaatttttgttgttttgtttattattttatttttagtatagaatttggtttatggtaggtgttaattgtgtttgtttgtttttttgtttaatgaatgaatagtatatattaatataagaatttgataaatttagggttgtaaaattattagtatggttttgtattgagattggagagaagtaatatttttaggaaaattaggaattttgggaataggatgtttgttttagtattttttttttgtttattttttttgtatttttattagtattgatttatatttaattttatagaagttttgtagttaaggattattttttttttttttttattttttttattttttgttaattttttttttttgttttgggggttggaatgagtaagaagtagtttgggattttatttatttatttaataaatatttttgagtttttagttttagtattttgttaagtaaggtaaaatttttaggaggtattatttat

SEQ ID NO: 104 - DNA, 3001 bp, homo sapiens
gtgaatggtgttttttggagattttgttttgtttagtaaggtgttagagttaaggatttagaaatgtttgttaagtgagtgaatggaattttaggttattttttatttattttaatttttaggacgaaaaagaaaagttgataaggggtgaggagagtgggggaggagaaagggtgatttttagttataaggtttttatgagattgggtgtgggtcggtgttgatgggagtgtaggggaggtgagtagggagaggatattaaagtaagcgttttgtttttagggtttttaatttttttagaaatattattttttttcgattttagtgtagaattatattgatgattttatagttttggatttgttaagtttttatgttgatgtatgttgtttatttattaaatagaagaataaataaacgtagttagcgtttattataagttaaattttgtgttggaggtagagtggtgaataggatagtaaaggttttatttcgtatggggaagtaattattttcgggaggtggtattttaattgcgattagaagaaaaaagaagagtgagtgatttagattaggttaggtagttaggaagtttgagggatatagttttttgaagcgggtttggagtaagggagtgagggagattagtggataggggttaaattaggtagggtttgtggagattgtattttatttaaggtaattgggagttagtaaataattttaagaaaaaaaaagtgatatgggtaaattttaattttttaaaatggagcgtaggttggaagaggtaaaagtagaggtagggagagttattaagaagttattgcggttgttttggcgatatatgatggtgtttttaattagggtggtgttagaagagatggagagaagtggatagttataggtacgtttaggaagtaaaattcgataggggtggtgatagtaaatagttttattttaaaaaagattatggaaaatattttagtttgtttattaatttattaggcgttcgtttttttttaattttatcgtttcgatatatggatatagtagggggacgaggggcggggtaggcgtttataaaaattcgggaattttaatttaaattgtgtggattttagcggagagtagaataaagaatataggaattttcggttatttcggaagtggaagttttatatttttaagtttttttttcggcggcgagttagggagaaaggatggtcggtttggcggcgcggttggttttgttagttggggtagcggcgttggcgagcggtttttagggcgatcgtgagtcggtgtatcgcgattgcgtattgtagtgcgaagagtagaattgttttgggggcgttttgaattattttcgttttcgttagttaatttatatgagtttagtaggtaagttttatttttacggtaagtttcgtttatttgttttgttttcgttttttgcgtttttaatacgtttttgtaatttttgaattttagtttttttacgaggttttttatgaatgtgagtgaagtttttaaggtgatgagagttttattagttttttttatttttttagaagtttttatttatttatttgtttagttaaaagggtatttattaaatatattcgggttataatgtttaggaatggtatagaaattagattagggtttcgtttattgggatttatagtttttacggggatatgagtttttttaagtgtaaggtagagaatgatttgagtttttgaaagattttttgattaggaagtatttgggataggaaggtgttagtttcggttttgaagacgtgggggtagggattattttggaacgttttgtttgaaggagggattttggattggtatattcgatttggattatagtgggtaaagaattaacgtattgagtatttattgtgtgataggtgttataatatgttaagtaatttttattatattttttgagatagtttttttaattttagttttatagatggggattagagagattaaatgttttgtttaaggttatatagttagtatgtagtaaagtggagtttttagttttggtttgtttgattataagtttgttttttttattattatattattttgtattttagatagagggaatagagagaatggatgttttgggtagatgtgggtatatttaggagttttatttatttagggagtagggtatatgaataggagtagtgattaatacggttggaaaggtaatttggagttttaaaagttaggttgaagaatttgggttttatttttataggaagggagtaagatagtaagaattttttttaggagagtaagagtaaattttatatttaggaaggataaatataaatttaggtttttatagatgagtttattagatgttaatattttgatggatttgagtaaaaggagaggaaatgtttgttaaggtagaaagattatttgagttttggagtttaagattagtttaggtaatatgataagatgttttttttataaaaaataaaagaattagttagatattgtggtttcgttatttgggaggttgaggtgggaggatcgtttgagtttaggaggttaaggttgtggtgagttatgttttttttattgtattttagtttggatgaaagagcgagattttgttttaaaaaaaaaaaaaaaaaaaaaatgtcgggtgcggtggttcgtgtttgtaattttcgtattttaggtggtagaggtaggtagataatttgaggttgggagtttaagattattttgattaatatggagaaattttatttttattaaaaatataaaattagttgggtgtggtggtgtatgtttgtaattttagttattcgggagtttgaggtaggagaatcgtttgaatttaggaggcggaggttgtagtgaatcgagatcgtattattgtattttagtttgggtaataaaaataaaattgttttaaaaaaataaataaaaaaaagacgaatatttttaattgttta

SEQ ID NO: 105 - DNA, 3001 bp, homo sapiens
gtgaatggtgttttttggagattttgttttgtttagtaaggtgttagagttaaggatttagaaatgtttgttaagtgagtgaatggaattttaggttattttttatttattttaatttttaggatgaaaaagaaaagttgataaggggtgaggagagtgggggaggagaaagggtgatttttagttataaggtttttatgagattgggtgtgggttggtgttgatgggagtgtaggggaggtgagtagggagaggatattaaagtaagtgttttgtttttagggtttttaatttttttagaaatattatttttttttgattttagtgtagaattatattgatgattttatagttttggatttgttaagtttttatgttgatgtatgttgtttatttattaaatagaagaataaataaatgtagttagtgtttattataagttaaattttgtgttggaggtagagtggtgaataggatagtaaaggttttattttgtatggggaagtaattatttttgggaggtggtattttaattgtgattagaagaaaaaagaagagtgagtgatttagattaggttaggtagttaggaagtttgagggatatagttttttgaagtgggtttggagtaagggagtgagggagattagtggataggggttaaattaggtagggtttgtggagattgtattttatttaaggtaattgggagttagtaaataattttaagaaaaaaaaagtgatatgggtaaattttaattttttaaaatggagtgtaggttggaagaggtaaaagtagaggtagggagagttattaagaagttattgtggttgttttggtgatatatgatggtgtttttaattagggtggtgttagaagagatggagagaagtggatagttataggtatgtttaggaagtaaaatttgataggggtggtgatagtaaatagttttattttaaaaaagattatggaaaatattttagtttgtttattaatttattaggtgtttgtttttttttaattttattgttttgatatatggatatagtagggggatgaggggtggggtaggtgtttataaaaatttgggaattttaatttaaattgtgtggattttagtggagagtagaataaagaatataggaatttttggttattttggaagtggaagttttatatttttaagttttttttttggtggtgagttagggagaaaggatggttggtttggtggtgtggttggttttgttagttggggtagtggtgttggtgagtggtttttagggtgattgtgagttggtgtattgtgattgtgtattgtagtgtgaagagtagaattgttttgggggtgttttgaattatttttgtttttgttagttaatttatatgagtttagtaggtaagttttatttttatggtaagttttgtttatttgttttgtttttgttttttgtgtttttaatatgtttttgtaatttttgaattttagtttttttatgaggttttttatgaatgtgagtgaagtttttaaggtgatgagagttttattagttttttttatttttttagaagtttttatttatttatttgtttagttaaaagggtatttattaaatatatttgggttataatgtttaggaatggtatagaaattagattagggttttgtttattgggatttatagtttttatggggatatgagtttttttaagtgtaaggtagagaatgatttgagtttttgaaagattttttgattaggaagtatttgggataggaaggtgttagttttggttttgaagatgtgggggtagggattattttggaatgttttgtttgaaggagggattttggattggtatatttgatttggattatagtgggtaaagaattaatgtattgagtatttattgtgtgataggtgttataatatgttaagtaatttttattatattttttgagatagtttttttaattttagttttatagatggggattagagagattaaatgttttgtttaaggttatatagttagtatgtagtaaagtggagtttttagttttggtttgtttgattataagtttgttttttttattattatattattttgtattttagatagagggaatagagagaatggatgttttgggtagatgtgggtatatttaggagttttatttatttagggagtagggtatatgaataggagtagtgattaatatggttggaaaggtaatttggagttttaaaagttaggttgaagaatttgggttttatttttataggaagggagtaagatagtaagaattttttttaggagagtaagagtaaattttatatttaggaaggataaatataaatttaggtttttatagatgagtttattagatgttaatattttgatggatttgagtaaaaggagaggaaatgtttgttaaggtagaaagattatttgagttttggagtttaagattagtttaggtaatatgataagatgttttttttataaaaaataaaagaattagttagatattgtggttttgttatttgggaggttgaggtgggaggattgtttgagtttaggaggttaaggttgtggtgagttatgttttttttattgtattttagtttggatgaaagagtgagattttgttttaaaaaaaaaaaaaaaaaaaaaatgttgggtgtggtggtttgtgtttgtaatttttgtattttaggtggtagaggtaggtagataatttgaggttgggagtttaagattattttgattaatatggagaaattttatttttattaaaaatataaaattagttgggtgtggtggtgtatgtttgtaattttagttatttgggagtttgaggtaggagaattgtttgaatttaggaggtggaggttgtagtgaattgagattgtattattgtattttagtttgggtaataaaaataaaattgttttaaaaaaataaataaaaaaaagatgaatatttttaattgttta

SEQ ID NO: 106 - DNA, 50 bp, homo sapiens
ggtagggctgtttactgtcaccacccctgtcggattttacttcctaaacg

SEQ ID NO: 107 - DNA, 50 bp, homo sapiens
ggtagggttgtttattgttattatttttgtcggattttattttttaaacg

SEQ ID NO: 108 - DNA, 50 bp, homo sapiens
ggtagggttgtttattgttattatttttgttggattttattttttaaatg

SEQ ID NO: 109 - DNA, 50 bp, homo sapiens
cgtttaggaagtaaaattcgataggggtggtgatagtaaatagttttatt

SEQ ID NO: 110 - DNA, 50 bp, homo sapiens
tgtttaggaagtaaaatttgataggggtggtgatagtaaatagttttatt

SEQ ID NO: 111 - DNA, 3001 bp, homo sapiens
gtccatcaagatgttggcatctgatgaactcatctatggaaacctgggtttatatttgtccttcctgaatataggatttgctcttactctcctggaaggagttcttgctatcttactcccttcctatgaaaatgaagcccaaattcttcaacctgacttttgaggctccaaattgcctttccaaccgtattggtcactactcctgttcatgtaccctgctccctgagtaaataaagctcctggatgtgcccacatctgcccagggcatccattctctctgttccctctgtctggaatgcaaagtggtataatagtaaagaggacaagcttgtggtcaaacaggccagaactggaaactccactttactacatactggctgtgtgaccttgggcagggcatttaatctctctaatccccatctgtaaaactgggattagagaaactatctcaaagggtgtgataaaaattacttgacatattgtgacacctgtcacacagtgagtgctcaatacgttggttctttgcccactatggtccaaatcgaatgtaccagtccaaagtccctccttcaaacaaaacgttccaagatgatccctgcccccacgtcttcaaagccggaactgacaccttcctatcccaaatgcttcctaatcaaagagtctttcaggggctcaaatcattctctgccttgcacttgaaaaggctcatgtccccgtggggactgtgagtcccaatgggcgggaccctggtctgatttctgtgccattcctagacattgtggcccgaatgtatttaataaatacccttttgactgaacaaataagtaaatgaaagcttctgggaaagtaagagaggctggtaaggctctcatcaccttaggggcttcactcacattcataagagacctcgtggggaaactaaggttcagggattgcagaggcgtattgggggcgcagggggcgggagcaagacaaatgggcggggcttaccgtgggggtggggcttacctgctagactcatgtagattggctggcgggagcggaagtgattcagagcgcccccagagcagttctgctcttcgcactgcagtacgcagtcgcggtacaccggctcacggtcgccctgggagccgctcgccagcgccgctgccccagctagcaggaccaaccgcgccgccaggccggccatcctttctccctggctcgccgccgggggaggagcttaggagtatgaagcttccacttccggagtaaccggaagttcctgtgttctttattctactctccgctgaagtccacacagtttaaattaaagttcccggatttttgtgggcgcctgccccgcccctcgtccccctgctgtgtccatatatcgaggcgatagggttaagggaaggcggacgcctgatgggttaatgagcaaactgaagtgttttccatgatcttttttgaggtagggctgtttactgtcaccacccctgtcggattttacttcctaaacgtacctgtaactatccacttctctccatctcttctggcaccaccctggttaaagacaccatcatgtgtcgccaagacagccgcagtagcttcttaatggctctccctgcctctacttttgcctcttccaacctgcgctccattttgaaaaattaaaatttgcccatatcactttttttttcttaaaattatttactggctcccaattaccttgggtaaaatacagtctccacaaaccctgcctgatttggcccctgtccactggtctccctcactcccttgctccagacccgcttcagagggctatgtccctcaagcttcctgactgcctggcctggtctgaatcactcactcttcttttttcttctagtcgcaattgaagtaccacctcccgagggtgattgcttccccatgcggggtagaacctttgctgtcctgttcaccactctacctccagcacagaatttggcttatggtaggcgctaactgcgtttgtttgttcttctgtttaatgaatgaacagcatacatcaacataagaacttgacaaatccagggctgtaaaatcatcagtatggttctgcactgagatcggagagaagtaatatttctaggaaaattaggaaccctgggaacaggacgcttgctttagtatcctctccctgctcacctcccctgcactcccatcagcaccgacccacacccaatctcatagaagccttgtagctaaggatcaccctttctcctcccccactctcctcaccccttgtcaacttttctttttcgtcctgggggttggaatgagtaagaagtagcctgggattccattcactcacttaacaaacatttctgagtccttagctctagcaccttgctaagcaaggcaaaatctccaggaggcaccattcacattgcattttctgtgaatggtgctctggggagcagcattcacattgccttttctgtgaatggcaaattcttccagttaaatataacatgaatagtgtcccctggagttgaccacccaactgatactgactgagaagctgaaatgaacaaaacaaccccttagccctccaggagctgaccggaaatccagtgctaatactactttgcatcttacagattagttcttttacaatactgtttttttttcttttttcatttcattttgtcctttctgtgactctgggatgagtctttttatgaggatcctcatataaagatggacatttaggattaaagaggatgaaatcctgacaaaatagggagtctcccctttagaaaattcctaagtaaggctgggggtggtggctcacgcctgtaatcccagcactttgggaggccgaggcggacggatcacctgaggttaggagtttgagaccagcctgaccaacatggagaaaccccatctctactaaaaatacaaaattagttgggtgtggtggtgcatgcctgtaatcccagctactcaggaggctgaggcaggagaatcgcttgaa

SEQ ID NO: 112 - DNA, 3001 bp, homo sapiens
gtttattaagatgttggtatttgatgaatttatttatggaaatttgggtttatatttgttttttttgaatataggatttgtttttatttttttggaaggagtttttgttattttattttttttttatgaaaatgaagtttaaattttttaatttgatttttgaggttttaaattgtttttttaatcgtattggttattatttttgtttatgtattttgttttttgagtaaataaagtttttggatgtgtttatatttgtttagggtatttattttttttgttttttttgtttggaatgtaaagtggtataatagtaaagaggataagtttgtggttaaataggttagaattggaaattttattttattatatattggttgtgtgattttgggtagggtatttaatttttttaatttttatttgtaaaattgggattagagaaattattttaaagggtgtgataaaaattatttgatatattgtgatatttgttatatagtgagtgtttaatacgttggttttttgtttattatggtttaaatcgaatgtattagtttaaagttttttttttaaataaaacgttttaagatgatttttgtttttacgtttttaaagtcggaattgatatttttttattttaaatgttttttaattaaagagttttttaggggtttaaattattttttgttttgtatttgaaaaggtttatgttttcgtggggattgtgagttttaatgggcgggattttggtttgatttttgtgttatttttagatattgtggttcgaatgtatttaataaatatttttttgattgaataaataagtaaatgaaagtttttgggaaagtaagagaggttggtaaggtttttattattttaggggttttatttatatttataagagatttcgtggggaaattaaggtttagggattgtagaggcgtattgggggcgtagggggcgggagtaagataaatgggcggggtttatcgtgggggtggggtttatttgttagatttatgtagattggttggcgggagcggaagtgatttagagcgtttttagagtagttttgtttttcgtattgtagtacgtagtcgcggtatatcggtttacggtcgttttgggagtcgttcgttagcgtcgttgttttagttagtaggattaatcgcgtcgttaggtcggttattttttttttttggttcgtcgtcgggggaggagtttaggagtatgaagtttttattttcggagtaatcggaagtttttgtgttttttattttatttttcgttgaagtttatatagtttaaattaaagttttcggatttttgtgggcgtttgtttcgtttttcgtttttttgttgtgtttatatatcgaggcgatagggttaagggaaggcggacgtttgatgggttaatgagtaaattgaagtgttttttatgattttttttgaggtagggttgtttattgttattatttttgtcggattttattttttaaacgtatttgtaattatttatttttttttattttttttggtattattttggttaaagatattattatgtgtcgttaagatagtcgtagtagttttttaatggttttttttgtttttatttttgttttttttaatttgcgttttattttgaaaaattaaaatttgtttatattatttttttttttttaaaattatttattggtttttaattattttgggtaaaatatagtttttataaattttgtttgatttggtttttgtttattggttttttttatttttttgttttagattcgttttagagggttatgttttttaagttttttgattgtttggtttggtttgaattatttatttttttttttttttttagtcgtaattgaagtattatttttcgagggtgattgtttttttatgcggggtagaatttttgttgttttgtttattattttatttttagtatagaatttggtttatggtaggcgttaattgcgtttgtttgtttttttgtttaatgaatgaatagtatatattaatataagaatttgataaatttagggttgtaaaattattagtatggttttgtattgagatcggagagaagtaatatttttaggaaaattaggaattttgggaataggacgtttgttttagtattttttttttgtttattttttttgtatttttattagtatcgatttatatttaattttatagaagttttgtagttaaggattattttttttttttttttattttttttattttttgttaatttttttttttcgttttgggggttggaatgagtaagaagtagtttgggattttatttatttatttaataaatatttttgagtttttagttttagtattttgttaagtaaggtaaaatttttaggaggtattatttatattgtattttttgtgaatggtgttttggggagtagtatttatattgttttttttgtgaatggtaaatttttttagttaaatataatatgaatagtgttttttggagttgattatttaattgatattgattgagaagttgaaatgaataaaataattttttagttttttaggagttgatcggaaatttagtgttaatattattttgtattttatagattagtttttttataatattgtttttttttttttttttattttattttgttttttttgtgattttgggatgagtttttttatgaggatttttatataaagatggatatttaggattaaagaggatgaaattttgataaaatagggagttttttttttagaaaatttttaagtaaggttgggggtggtggtttacgtttgtaattttagtattttgggaggtcgaggcggacggattatttgaggttaggagtttgagattagtttgattaatatggagaaattttatttttattaaaaatataaaattagttgggtgtggtggtgtatgtttgtaattttagttatttaggaggttgaggtaggagaatcgtttgaa

SEQ ID NO: 113 - DNA, 3001 bp, homo sapiens
gtttattaagatgttggtatttgatgaatttatttatggaaatttgggtttatatttgttttttttgaatataggatttgtttttatttttttggaaggagtttttgttattttattttttttttatgaaaatgaagtttaaattttttaatttgatttttgaggttttaaattgtttttttaattgtattggttattatttttgtttatgtattttgttttttgagtaaataaagtttttggatgtgtttatatttgtttagggtatttattttttttgttttttttgtttggaatgtaaagtggtataatagtaaagaggataagtttgtggttaaataggttagaattggaaattttattttattatatattggttgtgtgattttgggtagggtatttaatttttttaatttttatttgtaaaattgggattagagaaattattttaaagggtgtgataaaaattatttgatatattgtgatatttgttatatagtgagtgtttaatatgttggttttttgtttattatggtttaaattgaatgtattagtttaaagttttttttttaaataaaatgttttaagatgatttttgtttttatgtttttaaagttggaattgatatttttttattttaaatgttttttaattaaagagttttttaggggtttaaattattttttgttttgtatttgaaaaggtttatgtttttgtggggattgtgagttttaatgggtgggattttggtttgatttttgtgttatttttagatattgtggtttgaatgtatttaataaatatttttttgattgaataaataagtaaatgaaagtttttgggaaagtaagagaggttggtaaggtttttattattttaggggttttatttatatttataagagattttgtggggaaattaaggtttagggattgtagaggtgtattgggggtgtagggggtgggagtaagataaatgggtggggtttattgtgggggtggggtttatttgttagatttatgtagattggttggtgggagtggaagtgatttagagtgtttttagagtagttttgttttttgtattgtagtatgtagttgtggtatattggtttatggttgttttgggagttgtttgttagtgttgttgttttagttagtaggattaattgtgttgttaggttggttattttttttttttggtttgttgttgggggaggagtttaggagtatgaagtttttatttttggagtaattggaagtttttgtgttttttattttattttttgttgaagtttatatagtttaaattaaagtttttggatttttgtgggtgtttgttttgttttttgtttttttgttgtgtttatatattgaggtgatagggttaagggaaggtggatgtttgatgggttaatgagtaaattgaagtgttttttatgattttttttgaggtagggttgtttattgttattatttttgttggattttattttttaaatgtatttgtaattatttatttttttttattttttttggtattattttggttaaagatattattatgtgttgttaagatagttgtagtagttttttaatggttttttttgtttttatttttgttttttttaatttgtgttttattttgaaaaattaaaatttgtttatattatttttttttttttaaaattatttattggtttttaattattttgggtaaaatatagtttttataaattttgtttgatttggtttttgtttattggttttttttatttttttgttttagatttgttttagagggttatgttttttaagttttttgattgtttggtttggtttgaattatttatttttttttttttttttagttgtaattgaagtattattttttgagggtgattgtttttttatgtggggtagaatttttgttgttttgtttattattttatttttagtatagaatttggtttatggtaggtgttaattgtgtttgtttgtttttttgtttaatgaatgaatagtatatattaatataagaatttgataaatttagggttgtaaaattattagtatggttttgtattgagattggagagaagtaatatttttaggaaaattaggaattttgggaataggatgtttgttttagtattttttttttgtttattttttttgtatttttattagtattgatttatatttaattttatagaagttttgtagttaaggattattttttttttttttttattttttttattttttgttaattttttttttttgttttgggggttggaatgagtaagaagtagtttgggattttatttatttatttaataaatatttttgagtttttagttttagtattttgttaagtaaggtaaaatttttaggaggtattatttatattgtattttttgtgaatggtgttttggggagtagtatttatattgttttttttgtgaatggtaaatttttttagttaaatataatatgaatagtgttttttggagttgattatttaattgatattgattgagaagttgaaatgaataaaataattttttagttttttaggagttgattggaaatttagtgttaatattattttgtattttatagattagtttttttataatattgtttttttttttttttttattttattttgttttttttgtgattttgggatgagtttttttatgaggatttttatataaagatggatatttaggattaaagaggatgaaattttgataaaatagggagttttttttttagaaaatttttaagtaaggttgggggtggtggtttatgtttgtaattttagtattttgggaggttgaggtggatggattatttgaggttaggagtttgagattagtttgattaatatggagaaattttatttttattaaaaatataaaattagttgggtgtggtggtgtatgtttgtaattttagttatttaggaggttgaggtaggagaattgtttgaa

SEQ ID NO: 114 - DNA, 3001 bp, homo sapiens
tttaagcgatttttttgttttagttttttgagtagttgggattataggtatgtattattatatttaattaattttgtatttttagtagagatggggtttttttatgttggttaggttggttttaaatttttaattttaggtgattcgttcgtttcggttttttaaagtgttgggattataggcgtgagttattatttttagttttatttaggaattttttaaaggggagattttttattttgttaggattttattttttttaattttaaatgtttatttttatatgaggatttttataaaaagatttattttagagttatagaaaggataaaatgaaatgaaaaaagaaaaaaaaatagtattgtaaaagaattaatttgtaagatgtaaagtagtattagtattggattttcggttagtttttggagggttaaggggttgttttgtttattttagttttttagttagtattagttgggtggttaattttaggggatattatttatgttatatttaattggaagaatttgttatttatagaaaaggtaatgtgaatgttgttttttagagtattatttatagaaaatgtaatgtgaatggtgttttttggagattttgttttgtttagtaaggtgttagagttaaggatttagaaatgtttgttaagtgagtgaatggaattttaggttattttttatttattttaatttttaggacgaaaaagaaaagttgataaggggtgaggagagtgggggaggagaaagggtgatttttagttataaggtttttatgagattgggtgtgggtcggtgttgatgggagtgtaggggaggtgagtagggagaggatattaaagtaagcgttttgtttttagggtttttaatttttttagaaatattattttttttcgattttagtgtagaattatattgatgattttatagttttggatttgttaagtttttatgttgatgtatgttgtttatttattaaatagaagaataaataaacgtagttagcgtttattataagttaaattttgtgttggaggtagagtggtgaataggatagtaaaggttttatttcgtatggggaagtaattattttcgggaggtggtattttaattgcgattagaagaaaaaagaagagtgagtgatttagattaggttaggtagttaggaagtttgagggatatagttttttgaagcgggtttggagtaagggagtgagggagattagtggataggggttaaattaggtagggtttgtggagattgtattttatttaaggtaattgggagttagtaaataattttaagaaaaaaaaagtgatatgggtaaattttaattttttaaaatggagcgtaggttggaagaggtaaaagtagaggtagggagagttattaagaagttattgcggttgttttggcgatatatgatggtgtttttaattagggtggtgttagaagagatggagagaagtggatagttataggtacgtttaggaagtaaaattcgataggggtggtgatagtaaatagttttattttaaaaaagattatggaaaatattttagtttgtttattaatttattaggcgttcgtttttttttaattttatcgtttcgatatatggatatagtagggggacgaggggcggggtaggcgtttataaaaattcgggaattttaatttaaattgtgtggattttagcggagagtagaataaagaatataggaattttcggttatttcggaagtggaagttttatatttttaagtttttttttcggcggcgagttagggagaaaggatggtcggtttggcggcgcggttggttttgttagttggggtagcggcgttggcgagcggtttttagggcgatcgtgagtcggtgtatcgcgattgcgtattgtagtgcgaagagtagaattgttttgggggcgttttgaattattttcgttttcgttagttaatttatatgagtttagtaggtaagttttatttttacggtaagtttcgtttatttgttttgttttcgttttttgcgtttttaatacgtttttgtaatttttgaattttagtttttttacgaggttttttatgaatgtgagtgaagtttttaaggtgatgagagttttattagttttttttatttttttagaagtttttatttatttatttgtttagttaaaagggtatttattaaatatattcgggttataatgtttaggaatggtatagaaattagattagggtttcgtttattgggatttatagtttttacggggatatgagtttttttaagtgtaaggtagagaatgatttgagtttttgaaagattttttgattaggaagtatttgggataggaaggtgttagtttcggttttgaagacgtgggggtagggattattttggaacgttttgtttgaaggagggattttggattggtatattcgatttggattatagtgggtaaagaattaacgtattgagtatttattgtgtgataggtgttataatatgttaagtaatttttattatattttttgagatagtttttttaattttagttttatagatggggattagagagattaaatgttttgtttaaggttatatagttagtatgtagtaaagtggagtttttagttttggtttgtttgattataagtttgttttttttattattatattattttgtattttagatagagggaatagagagaatggatgttttgggtagatgtgggtatatttaggagttttatttatttagggagtagggtatatgaataggagtagtgattaatacggttggaaaggtaatttggagttttaaaagttaggttgaagaatttgggttttatttttataggaagggagtaagatagtaagaattttttttaggagagtaagagtaaattttatatttaggaaggataaatataaatttaggtttttatagatgagtttattagatgttaatattttgatggat

SEQ ID NO: 115 - DNA, 3001 bp, homo sapiens
tttaagtgatttttttgttttagttttttgagtagttgggattataggtatgtattattatatttaattaattttgtatttttagtagagatggggtttttttatgttggttaggttggttttaaatttttaattttaggtgatttgtttgttttggttttttaaagtgttgggattataggtgtgagttattatttttagttttatttaggaattttttaaaggggagattttttattttgttaggattttattttttttaattttaaatgtttatttttatatgaggatttttataaaaagatttattttagagttatagaaaggataaaatgaaatgaaaaaagaaaaaaaaatagtattgtaaaagaattaatttgtaagatgtaaagtagtattagtattggatttttggttagtttttggagggttaaggggttgttttgtttattttagttttttagttagtattagttgggtggttaattttaggggatattatttatgttatatttaattggaagaatttgttatttatagaaaaggtaatgtgaatgttgttttttagagtattatttatagaaaatgtaatgtgaatggtgttttttggagattttgttttgtttagtaaggtgttagagttaaggatttagaaatgtttgttaagtgagtgaatggaattttaggttattttttatttattttaatttttaggatgaaaaagaaaagttgataaggggtgaggagagtgggggaggagaaagggtgatttttagttataaggtttttatgagattgggtgtgggttggtgttgatgggagtgtaggggaggtgagtagggagaggatattaaagtaagtgttttgtttttagggtttttaatttttttagaaatattatttttttttgattttagtgtagaattatattgatgattttatagttttggatttgttaagtttttatgttgatgtatgttgtttatttattaaatagaagaataaataaatgtagttagtgtttattataagttaaattttgtgttggaggtagagtggtgaataggatagtaaaggttttattttgtatggggaagtaattatttttgggaggtggtattttaattgtgattagaagaaaaaagaagagtgagtgatttagattaggttaggtagttaggaagtttgagggatatagttttttgaagtgggtttggagtaagggagtgagggagattagtggataggggttaaattaggtagggtttgtggagattgtattttatttaaggtaattgggagttagtaaataattttaagaaaaaaaaagtgatatgggtaaattttaattttttaaaatggagtgtaggttggaagaggtaaaagtagaggtagggagagttattaagaagttattgtggttgttttggtgatatatgatggtgtttttaattagggtggtgttagaagagatggagagaagtggatagttataggtatgtttaggaagtaaaatttgataggggtggtgatagtaaatagttttattttaaaaaagattatggaaaatattttagtttgtttattaatttattaggtgtttgtttttttttaattttattgttttgatatatggatatagtagggggatgaggggtggggtaggtgtttataaaaatttgggaattttaatttaaattgtgtggattttagtggagagtagaataaagaatataggaatttttggttattttggaagtggaagttttatatttttaagttttttttttggtggtgagttagggagaaaggatggttggtttggtggtgtggttggttttgttagttggggtagtggtgttggtgagtggtttttagggtgattgtgagttggtgtattgtgattgtgtattgtagtgtgaagagtagaattgttttgggggtgttttgaattatttttgtttttgttagttaatttatatgagtttagtaggtaagttttatttttatggtaagttttgtttatttgttttgtttttgttttttgtgtttttaatatgtttttgtaatttttgaattttagtttttttatgaggttttttatgaatgtgagtgaagtttttaaggtgatgagagttttattagttttttttatttttttagaagtttttatttatttatttgtttagttaaaagggtatttattaaatatatttgggttataatgtttaggaatggtatagaaattagattagggttttgtttattgggatttatagtttttatggggatatgagtttttttaagtgtaaggtagagaatgatttgagtttttgaaagattttttgattaggaagtatttgggataggaaggtgttagttttggttttgaagatgtgggggtagggattattttggaatgttttgtttgaaggagggattttggattggtatatttgatttggattatagtgggtaaagaattaatgtattgagtatttattgtgtgataggtgttataatatgttaagtaatttttattatattttttgagatagtttttttaattttagttttatagatggggattagagagattaaatgttttgtttaaggttatatagttagtatgtagtaaagtggagtttttagttttggtttgtttgattataagtttgttttttttattattatattattttgtattttagatagagggaatagagagaatggatgttttgggtagatgtgggtatatttaggagttttatttatttagggagtagggtatatgaataggagtagtgattaatatggttggaaaggtaatttggagttttaaaagttaggttgaagaatttgggttttatttttataggaagggagtaagatagtaagaattttttttaggagagtaagagtaaattttatatttaggaaggataaatataaatttaggtttttatagatgagtttattagatgttaatattttgatggat

SEQ ID NO: 116 - DNA, 50 bp, homo sapiens
cgctccgctcgacaaggaccacaaaaagccctttaaaagcccgcggtgct

SEQ ID NO: 117 - DNA, 50 bp, homo sapiens
cgtttcgttcgataaggattataaaaagttttttaaaagttcgcggtgtt

SEQ ID NO: 118 - DNA, 50 bp, homo sapiens
tgttttgtttgataaggattataaaaagttttttaaaagtttgtggtgtt

SEQ ID NO: 119 - DNA, 50 bp, homo sapiens
agtatcgcgggtttttaaagggttttttgtggtttttgtcgagcggagcg

SEQ ID NO: 120 - DNA, 50 bp, homo sapiens
agtattgtgggtttttaaagggttttttgtggtttttgttgagtggagtg

SEQ ID NO: 121 - DNA, 3001 bp, homo sapiens
aacagagtaaaactccttgctggatactcctcatttctagacatattattatgaaattgtattcatgaatgttggggaagctgccagactggaagaaagggaagcttagttaaatttaaattaagaacatttccagaaagaaaagtgtgatgcttaaatgaactctaatcagaacaaaagacaaggaagcaaattccctgggatcccaatggtgagaggagtttgtattcatgcagtctccaggagcctgtgaaacgggagttgggatagaagagcgcttcccgggagacatgggcttgttcacagattccaagatgcaatacagagagaggtgtatagacgtatgagtaggtgaagtttcttttcaaaaagaaatattatacatttaggaagtcttcccaaatcacctgtgctgcatttaaaactgctacggggaagggtagtgatatgtcaaagtctgatctgaccacgcagcctatcagagccaaacccatgctaccccacacgggaaacgggctttcctgggtctggaaagggaatccaccatctctctaaacgagtcacctcccagacgccctctttgtgggtcaggagggatccctcaggctggcgagcgcctggcatccgcgttggagagctcggcagcccggctgcacgccgcctcgccctttgccttcagtcctcacccggccaccagcgccacagctccctgctgcgggcttccggctctcccgggctccgttttactcccctcctatccactccgtttctctgggatttcttggggccaccagtgtctccttgctctggttcttgcaggcgcgtcgcctccacggacattacaggtacggcttgcccagtgctctcccccacggtctgctcttcccataccccagagtgtccccaagaagggcccacagagacgcaaactccggctttatctcggataagataccacattctaactgctgaggtcccagcctcaggccaaacttctggctcagctcggacccggaccgcgttctccctcccagggcagaagaggctgctggctcctcctgcatcatctcctgagttcagctccctggaccctatcccgaaagactctggctggggccgggaccggggccggggcccggccctccctgacttcagtctctctgaaaagttcaggacttgcgaaaatgcccccggctctgccacccaaaaggcaggacccgcgccttcctcgcgagctagaaggaacggctgcacctcccggtgctcccggggcaggagatgcggccacgaccacatttgatttcactgcttttcctgaaaaggacacacagcccagctctgtgtgtatacagggagaagcggagtcctgcgtttagtttttaaagcatatataaatgataagcattgaacaaagcagccaaaggcttggccctcccacaaacctaggaattcaaatccacatggccacagcccctccacccgggccctctcccagcacacgctccgctcgacaaggaccacaaaaagccctttaaaagcccgcggtgcttccgaggactcccagatttccagcccttcctcggcaaccccttcctcggccaccccttcctcacactcgaggacactccagcccctcccctccccagcttggacacccacctctgggcgcccgctcccgggggcgcagtcctggggttctgctccagtccagcgccgcgcggccgctgcctcccgctccgggggtccaggagactccgggggtccaggagactccgggggaaggcgagcggcagccccgggctggggccagcgcatctgcagggagtggtagcctccgggcgcgctggagggcggggagccccgcccgcctgctcctggggcccgccccttccccgcctcctcgcttcccctccagtagcccagcgcccacggaccgcccctccctcccctcccctccccatctacccacaccttctcctctcagtggcttcggcggaatcgatgcacaaacgaagaaatgaatgaatgcagagactggagagagggaaagacggagggatggatggggcgggcaaagctgagtgtttcctaactcaggggagcgctgtgtctgggtatatggatacttgttagcgcacggggctttggagcggggtggcgtgtcgctgtgtgtgcatgtggacgtgtgtgttggtgtacacatatgtgcgcatgagcgtatgtggaagtgtgtgagtgcctgtgtgcgctcaaatgccaggagccgctgagttcccactcaggcggggaaacagcccctcgtcccttacctagcaccacgactgtcctcagggtcagagcgactcccggaactggttgcgaagtgcgtctttgtggcagtaatggtgtctccgcgtgtttgaggactcccccgatggggttcagaggctgaggtgtggacagagatgcttccagctcactggctcgccagagccttcctgctgccctccgtgtagtggcagccggtggcccggtgtcagagcgcgtgtgctaacaaagccagcggaggggaaggaggcagctgatccgcagactggggctgtattaggcgggtggccagccatccctcactcttgagatgtctgaaatttcagtctctcatcccctcctccaccatgaatatttaaataatgttaatgaccctttgaaaatgaaccgtctagaaatcctgagagaggacaggcacacacaaacaaacaccccacctagagagcaacactttcaaaagcaagctgtggtcttactctgctgtaggtggccgcattcattctcagcagaggaagatcacaaaagtcagatttcttgaattcagctttgccctaggcacgattttcccagtaattctctctccccagctttgcaagtcgcccttgcactctcagttaggtttccaccctagggcagtctgctattttccccactccttgacaaggccctgggatgctcttctgggagtcaattt

SEQ ID NO: 122 - DNA, 3001 bp, homo sapiens
aatagagtaaaattttttgttggatattttttatttttagatatattattatgaaattgtatttatgaatgttggggaagttgttagattggaagaaagggaagtttagttaaatttaaattaagaatatttttagaaagaaaagtgtgatgtttaaatgaattttaattagaataaaagataaggaagtaaattttttgggattttaatggtgagaggagtttgtatttatgtagtttttaggagtttgtgaaacgggagttgggatagaagagcgtttttcgggagatatgggtttgtttatagattttaagatgtaatatagagagaggtgtatagacgtatgagtaggtgaagtttttttttaaaaagaaatattatatatttaggaagtttttttaaattatttgtgttgtatttaaaattgttacggggaagggtagtgatatgttaaagtttgatttgattacgtagtttattagagttaaatttatgttattttatacgggaaacgggtttttttgggtttggaaagggaatttattatttttttaaacgagttattttttagacgttttttttgtgggttaggagggattttttaggttggcgagcgtttggtattcgcgttggagagttcggtagttcggttgtacgtcgtttcgttttttgtttttagtttttattcggttattagcgttatagttttttgttgcgggttttcggttttttcgggtttcgttttattttttttttatttatttcgtttttttgggattttttggggttattagtgtttttttgttttggtttttgtaggcgcgtcgtttttacggatattataggtacggtttgtttagtgtttttttttacggtttgttttttttatattttagagtgtttttaagaagggtttatagagacgtaaatttcggttttatttcggataagatattatattttaattgttgaggttttagttttaggttaaatttttggtttagttcggattcggatcgcgtttttttttttagggtagaagaggttgttggttttttttgtattattttttgagtttagttttttggattttatttcgaaagattttggttggggtcgggatcggggtcggggttcggttttttttgattttagtttttttgaaaagtttaggatttgcgaaaatgttttcggttttgttatttaaaaggtaggattcgcgtttttttcgcgagttagaaggaacggttgtatttttcggtgttttcggggtaggagatgcggttacgattatatttgattttattgttttttttgaaaaggatatatagtttagttttgtgtgtatatagggagaagcggagttttgcgtttagtttttaaagtatatataaatgataagtattgaataaagtagttaaaggtttggtttttttataaatttaggaatttaaatttatatggttatagtttttttattcgggtttttttttagtatacgtttcgttcgataaggattataaaaagttttttaaaagttcgcggtgttttcgaggatttttagatttttagttttttttcggtaatttttttttcggttattttttttttatattcgaggatattttagttttttttttttttagtttggatatttatttttgggcgttcgttttcgggggcgtagttttggggttttgttttagtttagcgtcgcgcggtcgttgtttttcgtttcgggggtttaggagatttcgggggtttaggagatttcgggggaaggcgagcggtagtttcgggttggggttagcgtatttgtagggagtggtagttttcgggcgcgttggagggcggggagtttcgttcgtttgtttttggggttcgtttttttttcgttttttcgttttttttttagtagtttagcgtttacggatcgtttttttttttttttttttttttatttatttatattttttttttttagtggtttcggcggaatcgatgtataaacgaagaaatgaatgaatgtagagattggagagagggaaagacggagggatggatggggcgggtaaagttgagtgttttttaatttaggggagcgttgtgtttgggtatatggatatttgttagcgtacggggttttggagcggggtggcgtgtcgttgtgtgtgtatgtggacgtgtgtgttggtgtatatatatgtgcgtatgagcgtatgtggaagtgtgtgagtgtttgtgtgcgtttaaatgttaggagtcgttgagtttttatttaggcggggaaatagtttttcgttttttatttagtattacgattgtttttagggttagagcgattttcggaattggttgcgaagtgcgtttttgtggtagtaatggtgttttcgcgtgtttgaggattttttcgatggggtttagaggttgaggtgtggatagagatgtttttagtttattggttcgttagagtttttttgttgtttttcgtgtagtggtagtcggtggttcggtgttagagcgcgtgtgttaataaagttagcggaggggaaggaggtagttgattcgtagattggggttgtattaggcgggtggttagttattttttatttttgagatgtttgaaattttagttttttatttttttttttattatgaatatttaaataatgttaatgattttttgaaaatgaatcgtttagaaattttgagagaggataggtatatataaataaatattttatttagagagtaatatttttaaaagtaagttgtggttttattttgttgtaggtggtcgtatttatttttagtagaggaagattataaaagttagattttttgaatttagttttgttttaggtacgatttttttagtaattttttttttttagttttgtaagtcgtttttgtatttttagttaggtttttattttagggtagtttgttattttttttattttttgataaggttttgggatgtttttttgggagttaattt

SEQ ID NO: 123 - DNA, 3001 bp, homo sapiens
aatagagtaaaattttttgttggatattttttatttttagatatattattatgaaattgtatttatgaatgttggggaagttgttagattggaagaaagggaagtttagttaaatttaaattaagaatatttttagaaagaaaagtgtgatgtttaaatgaattttaattagaataaaagataaggaagtaaattttttgggattttaatggtgagaggagtttgtatttatgtagtttttaggagtttgtgaaatgggagttgggatagaagagtgttttttgggagatatgggtttgtttatagattttaagatgtaatatagagagaggtgtatagatgtatgagtaggtgaagtttttttttaaaaagaaatattatatatttaggaagtttttttaaattatttgtgttgtatttaaaattgttatggggaagggtagtgatatgttaaagtttgatttgattatgtagtttattagagttaaatttatgttattttatatgggaaatgggtttttttgggtttggaaagggaatttattatttttttaaatgagttattttttagatgttttttttgtgggttaggagggattttttaggttggtgagtgtttggtatttgtgttggagagtttggtagtttggttgtatgttgttttgttttttgtttttagtttttatttggttattagtgttatagttttttgttgtgggtttttggtttttttgggttttgttttattttttttttatttattttgtttttttgggattttttggggttattagtgtttttttgttttggtttttgtaggtgtgttgtttttatggatattataggtatggtttgtttagtgtttttttttatggtttgttttttttatattttagagtgtttttaagaagggtttatagagatgtaaattttggttttattttggataagatattatattttaattgttgaggttttagttttaggttaaatttttggtttagtttggatttggattgtgtttttttttttagggtagaagaggttgttggttttttttgtattattttttgagtttagttttttggattttattttgaaagattttggttggggttgggattggggttggggtttggttttttttgattttagtttttttgaaaagtttaggatttgtgaaaatgtttttggttttgttatttaaaaggtaggatttgtgttttttttgtgagttagaaggaatggttgtattttttggtgtttttggggtaggagatgtggttatgattatatttgattttattgttttttttgaaaaggatatatagtttagttttgtgtgtatatagggagaagtggagttttgtgtttagtttttaaagtatatataaatgataagtattgaataaagtagttaaaggtttggtttttttataaatttaggaatttaaatttatatggttatagtttttttatttgggtttttttttagtatatgttttgtttgataaggattataaaaagttttttaaaagtttgtggtgtttttgaggatttttagatttttagtttttttttggtaattttttttttggttattttttttttatatttgaggatattttagttttttttttttttagtttggatatttatttttgggtgtttgtttttgggggtgtagttttggggttttgttttagtttagtgttgtgtggttgttgttttttgttttgggggtttaggagattttgggggtttaggagattttgggggaaggtgagtggtagttttgggttggggttagtgtatttgtagggagtggtagtttttgggtgtgttggagggtggggagttttgtttgtttgtttttggggtttgttttttttttgtttttttgttttttttttagtagtttagtgtttatggattgtttttttttttttttttttttttatttatttatattttttttttttagtggttttggtggaattgatgtataaatgaagaaatgaatgaatgtagagattggagagagggaaagatggagggatggatggggtgggtaaagttgagtgttttttaatttaggggagtgttgtgtttgggtatatggatatttgttagtgtatggggttttggagtggggtggtgtgttgttgtgtgtgtatgtggatgtgtgtgttggtgtatatatatgtgtgtatgagtgtatgtggaagtgtgtgagtgtttgtgtgtgtttaaatgttaggagttgttgagtttttatttaggtggggaaatagttttttgttttttatttagtattatgattgtttttagggttagagtgatttttggaattggttgtgaagtgtgtttttgtggtagtaatggtgtttttgtgtgtttgaggatttttttgatggggtttagaggttgaggtgtggatagagatgtttttagtttattggtttgttagagtttttttgttgttttttgtgtagtggtagttggtggtttggtgttagagtgtgtgtgttaataaagttagtggaggggaaggaggtagttgatttgtagattggggttgtattaggtgggtggttagttattttttatttttgagatgtttgaaattttagttttttatttttttttttattatgaatatttaaataatgttaatgattttttgaaaatgaattgtttagaaattttgagagaggataggtatatataaataaatattttatttagagagtaatatttttaaaagtaagttgtggttttattttgttgtaggtggttgtatttatttttagtagaggaagattataaaagttagattttttgaatttagttttgttttaggtatgatttttttagtaattttttttttttagttttgtaagttgtttttgtatttttagttaggtttttattttagggtagtttgttattttttttattttttgataaggttttgggatgtttttttgggagttaattt

SEQ ID NO: 124 - DNA, 3001 bp, homo sapiens
aaattgatttttagaagagtattttagggttttgttaaggagtggggaaaatagtagattgttttagggtggaaatttaattgagagtgtaagggcgatttgtaaagttggggagagagaattattgggaaaatcgtgtttagggtaaagttgaatttaagaaatttgatttttgtgatttttttttgttgagaatgaatgcggttatttatagtagagtaagattatagtttgtttttgaaagtgttgttttttaggtggggtgtttgtttgtgtgtgtttgtttttttttaggatttttagacggtttatttttaaagggttattaatattatttaaatatttatggtggaggaggggatgagagattgaaattttagatattttaagagtgagggatggttggttattcgtttaatatagttttagtttgcggattagttgtttttttttttttcgttggttttgttagtatacgcgttttgatatcgggttatcggttgttattatacggagggtagtaggaaggttttggcgagttagtgagttggaagtatttttgtttatattttagtttttgaattttatcgggggagtttttaaatacgcggagatattattattgttataaagacgtatttcgtaattagtttcgggagtcgttttgattttgaggatagtcgtggtgttaggtaagggacgaggggttgttttttcgtttgagtgggaatttagcggtttttggtatttgagcgtatataggtatttatatatttttatatacgtttatgcgtatatatgtgtatattaatatatacgtttatatgtatatatagcgatacgttatttcgttttaaagtttcgtgcgttaataagtatttatatatttagatatagcgtttttttgagttaggaaatatttagttttgttcgttttatttattttttcgtttttttttttttttagtttttgtatttatttattttttcgtttgtgtatcgatttcgtcgaagttattgagaggagaaggtgtgggtagatggggaggggaggggagggaggggcggttcgtgggcgttgggttattggaggggaagcgaggaggcggggaaggggcgggttttaggagtaggcgggcggggtttttcgttttttagcgcgttcggaggttattattttttgtagatgcgttggttttagttcggggttgtcgttcgttttttttcggagttttttggattttcggagttttttggattttcggagcgggaggtagcggtcgcgcggcgttggattggagtagaattttaggattgcgttttcgggagcgggcgtttagaggtgggtgtttaagttggggaggggaggggttggagtgttttcgagtgtgaggaaggggtggtcgaggaaggggttgtcgaggaagggttggaaatttgggagttttcggaagtatcgcgggtttttaaagggttttttgtggtttttgtcgagcggagcgtgtgttgggagagggttcgggtggaggggttgtggttatgtggatttgaatttttaggtttgtgggagggttaagtttttggttgttttgtttaatgtttattatttatatatgttttaaaaattaaacgtaggatttcgtttttttttgtatatatatagagttgggttgtgtgttttttttaggaaaagtagtgaaattaaatgtggtcgtggtcgtattttttgtttcgggagtatcgggaggtgtagtcgttttttttagttcgcgaggaaggcgcgggttttgttttttgggtggtagagtcgggggtattttcgtaagttttgaattttttagagagattgaagttagggagggtcgggtttcggtttcggtttcggttttagttagagtttttcgggatagggtttagggagttgaatttaggagatgatgtaggaggagttagtagttttttttgttttgggagggagaacgcggttcgggttcgagttgagttagaagtttggtttgaggttgggattttagtagttagaatgtggtattttattcgagataaagtcggagtttgcgtttttgtgggttttttttggggatattttggggtatgggaagagtagatcgtgggggagagtattgggtaagtcgtatttgtaatgttcgtggaggcgacgcgtttgtaagaattagagtaaggagatattggtggttttaagaaattttagagaaacggagtggataggaggggagtaaaacggagttcgggagagtcggaagttcgtagtagggagttgtggcgttggtggtcgggtgaggattgaaggtaaagggcgaggcggcgtgtagtcgggttgtcgagttttttaacgcggatgttaggcgttcgttagtttgagggattttttttgatttataaagagggcgtttgggaggtgattcgtttagagagatggtggattttttttttagatttaggaaagttcgtttttcgtgtggggtagtatgggtttggttttgataggttgcgtggttagattagattttgatatattattattttttttcgtagtagttttaaatgtagtataggtgatttgggaagattttttaaatgtataatatttttttttgaaaagaaattttatttatttatacgtttatatatttttttttgtattgtattttggaatttgtgaataagtttatgtttttcgggaagcgtttttttattttaattttcgttttataggtttttggagattgtatgaatataaattttttttattattgggattttagggaatttgtttttttgttttttgttttgattagagtttatttaagtattatatttttttttttggaaatgtttttaatttaaatttaattaagttttttttttttttagtttggtagtttttttaatatttatgaatataattttataataatatgtttagaaatgaggagtatttagtaaggagttttattttgtt

SEQ ID NO: 125 - DNA, 3001 bp, homo sapiens
aaattgatttttagaagagtattttagggttttgttaaggagtggggaaaatagtagattgttttagggtggaaatttaattgagagtgtaagggtgatttgtaaagttggggagagagaattattgggaaaattgtgtttagggtaaagttgaatttaagaaatttgatttttgtgatttttttttgttgagaatgaatgtggttatttatagtagagtaagattatagtttgtttttgaaagtgttgttttttaggtggggtgtttgtttgtgtgtgtttgtttttttttaggatttttagatggtttatttttaaagggttattaatattatttaaatatttatggtggaggaggggatgagagattgaaattttagatattttaagagtgagggatggttggttatttgtttaatatagttttagtttgtggattagttgttttttttttttttgttggttttgttagtatatgtgttttgatattgggttattggttgttattatatggagggtagtaggaaggttttggtgagttagtgagttggaagtatttttgtttatattttagtttttgaattttattgggggagtttttaaatatgtggagatattattattgttataaagatgtattttgtaattagttttgggagttgttttgattttgaggatagttgtggtgttaggtaagggatgaggggttgtttttttgtttgagtgggaatttagtggtttttggtatttgagtgtatataggtatttatatatttttatatatgtttatgtgtatatatgtgtatattaatatatatgtttatatgtatatatagtgatatgttattttgttttaaagttttgtgtgttaataagtatttatatatttagatatagtgtttttttgagttaggaaatatttagttttgtttgttttatttatttttttgtttttttttttttttagtttttgtatttatttatttttttgtttgtgtattgattttgttgaagttattgagaggagaaggtgtgggtagatggggaggggaggggagggaggggtggtttgtgggtgttgggttattggaggggaagtgaggaggtggggaaggggtgggttttaggagtaggtgggtggggttttttgttttttagtgtgtttggaggttattattttttgtagatgtgttggttttagtttggggttgttgtttgtttttttttggagttttttggatttttggagttttttggatttttggagtgggaggtagtggttgtgtggtgttggattggagtagaattttaggattgtgtttttgggagtgggtgtttagaggtgggtgtttaagttggggaggggaggggttggagtgtttttgagtgtgaggaaggggtggttgaggaaggggttgttgaggaagggttggaaatttgggagtttttggaagtattgtgggtttttaaagggttttttgtggtttttgttgagtggagtgtgtgttgggagagggtttgggtggaggggttgtggttatgtggatttgaatttttaggtttgtgggagggttaagtttttggttgttttgtttaatgtttattatttatatatgttttaaaaattaaatgtaggattttgtttttttttgtatatatatagagttgggttgtgtgttttttttaggaaaagtagtgaaattaaatgtggttgtggttgtattttttgttttgggagtattgggaggtgtagttgttttttttagtttgtgaggaaggtgtgggttttgttttttgggtggtagagttgggggtatttttgtaagttttgaattttttagagagattgaagttagggagggttgggttttggttttggttttggttttagttagagttttttgggatagggtttagggagttgaatttaggagatgatgtaggaggagttagtagttttttttgttttgggagggagaatgtggtttgggtttgagttgagttagaagtttggtttgaggttgggattttagtagttagaatgtggtattttatttgagataaagttggagtttgtgtttttgtgggttttttttggggatattttggggtatgggaagagtagattgtgggggagagtattgggtaagttgtatttgtaatgtttgtggaggtgatgtgtttgtaagaattagagtaaggagatattggtggttttaagaaattttagagaaatggagtggataggaggggagtaaaatggagtttgggagagttggaagtttgtagtagggagttgtggtgttggtggttgggtgaggattgaaggtaaagggtgaggtggtgtgtagttgggttgttgagttttttaatgtggatgttaggtgtttgttagtttgagggattttttttgatttataaagagggtgtttgggaggtgatttgtttagagagatggtggattttttttttagatttaggaaagtttgttttttgtgtggggtagtatgggtttggttttgataggttgtgtggttagattagattttgatatattattatttttttttgtagtagttttaaatgtagtataggtgatttgggaagattttttaaatgtataatatttttttttgaaaagaaattttatttatttatatgtttatatatttttttttgtattgtattttggaatttgtgaataagtttatgttttttgggaagtgtttttttattttaatttttgttttataggtttttggagattgtatgaatataaattttttttattattgggattttagggaatttgtttttttgttttttgttttgattagagtttatttaagtattatatttttttttttggaaatgtttttaatttaaatttaattaagttttttttttttttagtttggtagtttttttaatatttatgaatataattttataataatatgtttagaaatgaggagtatttagtaaggagttttattttgtt

SEQ ID NO: 126 - DNA, 2792 bp, homo sapiens
aggttccagtgattctcctgcctcggcttcccaagtagctgggattacaggtgcctgccaccacgcccggctaattttttgtatttttagtagagaaggggtttcaccatgttggccaggctggtctcgaactcctgaccttaggtgatccacccgccttggcctcccaaagtgctgggattacaggtgtgagccaccgcatctggcctgatgtgtatatcttttaacatgcctttaaatcctatggctctaaagaggccatattagttatttcagtgtttatttcatttgatgaagaaacgtttgcatatgaatgttgggaattctagcaggtcctgcctcaatgtgaagaggcatttttttttgcttttggcattgatctccttttggactgggcctgatccacttcttacatccagtccaggacctgtcacaaaagactcacattagtaccacatggtatcctgttttagtaaagaataggtgaaatattttagtgagtagatcctacttttcctttcagatgcaatgaacagaagaccctgaaaggatttcaatccagaatgtcacaggataataagagcagatgtctgtgatgccctttacaaagcacctttacatactgtctctcattcgtctctaatgacacctatgtgatcctccattttttcagatgaggaaactgaggttcagagtgattaagcgagttgcctgagatttcacagctaacacattgtgaaatctagtctagcacccaggactaaaaactctcggcttcttttaaggccacatatcgcctcaccagaagggtggcctctctggagatataccctaccctcggccgacttgatattgagaacttggtcatcttaagcatgtgggccacttgggcaaggcagcccttcccaaattgtaaatgtccccacgtggagctcaagcgtctggcttgagccagaaggtgccctgaacactcggtggccccagcccccacgtaacagcacgtgctcgggtcccacattcggtcagacgcccctctccactggcatctgcccggtggaggcgccactgcgctctgcctccgccccagcaagcgcgtgtccacgcgggcgcgccacgccagccgtgcgccccagcggctcgccgtgcgcccgcgccccaggtgcccactggctcgcgcgccctccgtctgcgccttggagacccgcggcggcgatcgctcggagccgccttggaccgcggcctcgggtccatcacactccaggggcggagcgaggcaccgagacgtcagggcggagaactagcgccgggctagcgcgccctcccggcggctgccggcgtcccacgtcctcggctggcgcggccggcggcggcggcgaccgggagatgcagtgagcggcggcgctggggcgcagccaggcggccgggagggcgggggccagaggctgagcccgggcgagcccgccgtgcgcacagctctgcccgccgcccctggagcggatccccagccgtccctgggcgttctcccgggttctagcaaagccccccggggtgcccatcagtttccttgggtgactacagcgtgtgttttttctttcctctttcccctgcctgtgtgcccttctccaggatggcagaggcggaattgcacaaggaaaggctgcaagccatagcagtaagtccactttcattttattttcttgctctattgtctggggtggaagggggcccccgagggtttcggggcaagcggcatgccagcacagtagccgcaggtcatatgttccaggggctaaaactctgtcagggctcagctaggctgccttttcttttctatgtctatagatggagacccccaagggcgcgctttggactgaggatttgaatgtggaagattggcttaaaaaaagatgcttgctgctgggctttggggaaggactaaacagaggcttggggtggggggacgactccaggaatattatgaccgaatgctcaggcatacgttggcttcatagcctggagaaccaagagaagggtgacctgaacggtggctgccatcctctctgcggaagctgtcctcctgttaagtggaaaaccaggagtcagcgactcagccagccacgcggtagaacctcctcccagaaaccgggaatgttagttttcccttctctgtttgatattgacaagggcactggcacaagccaccaccctggaggtctggggacttcatacaactgggtcctggttataatattccatgagagcctccttcttatggtgtggagtatctgaaaacctattttcagcctacaaaggagtagtcagttttggcaaagttcgtaggcactttcagaaaagtgtacccatgtgcatcttgggtttaaaaaagaactctctgagactgcctagatttgagcaatcttaacacagtgttgccaatgatccacagatgtggtatttttactggagccaccacagctggattatatatttccttcgaggatgagggaatgattactgctgccgtatgaaatagtaacaattaaaaaagaaggtccgttaacatattggcataaaagaatctccagacattcttccacctaaatacatttgtgtttttcagttcggaagttctctggaaacacatataaatttgttggagaaatagtgtgtaatgttttggaaccaaagtatattaaagcgttttccaaaacctttttggacagattcttcattgggaaaatgcacacagacccttccttttttagaagcatttgacatggtctccaaggctc

SEQ ID NO: 127 - DNA, 2792 bp, homo sapiens
aggttttagtgatttttttgtttcggttttttaagtagttgggattataggtgtttgttattacgttcggttaattttttgtatttttagtagagaaggggttttattatgttggttaggttggtttcgaatttttgattttaggtgatttattcgttttggttttttaaagtgttgggattataggtgtgagttatcgtatttggtttgatgtgtatattttttaatatgtttttaaattttatggttttaaagaggttatattagttattttagtgtttattttatttgatgaagaaacgtttgtatatgaatgttgggaattttagtaggttttgttttaatgtgaagaggtatttttttttgtttttggtattgatttttttttggattgggtttgatttattttttatatttagtttaggatttgttataaaagatttatattagtattatatggtattttgttttagtaaagaataggtgaaatattttagtgagtagattttatttttttttttagatgtaatgaatagaagattttgaaaggattttaatttagaatgttataggataataagagtagatgtttgtgatgttttttataaagtatttttatatattgttttttattcgtttttaatgatatttatgtgattttttatttttttagatgaggaaattgaggtttagagtgattaagcgagttgtttgagattttatagttaatatattgtgaaatttagtttagtatttaggattaaaaattttcggttttttttaaggttatatatcgttttattagaagggtggtttttttggagatatattttattttcggtcgatttgatattgagaatttggttattttaagtatgtgggttatttgggtaaggtagttttttttaaattgtaaatgtttttacgtggagtttaagcgtttggtttgagttagaaggtgttttgaatattcggtggttttagtttttacgtaatagtacgtgttcgggttttatattcggttagacgtttttttttattggtatttgttcggtggaggcgttattgcgttttgttttcgttttagtaagcgcgtgtttacgcgggcgcgttacgttagtcgtgcgttttagcggttcgtcgtgcgttcgcgttttaggtgtttattggttcgcgcgtttttcgtttgcgttttggagattcgcggcggcgatcgttcggagtcgttttggatcgcggtttcgggtttattatattttaggggcggagcgaggtatcgagacgttagggcggagaattagcgtcgggttagcgcgttttttcggcggttgtcggcgttttacgttttcggttggcgcggtcggcggcggcggcgatcgggagatgtagtgagcggcggcgttggggcgtagttaggcggtcgggagggcgggggttagaggttgagttcgggcgagttcgtcgtgcgtatagttttgttcgtcgtttttggagcggatttttagtcgtttttgggcgttttttcgggttttagtaaagtttttcggggtgtttattagtttttttgggtgattatagcgtgtgttttttttttttttttttttttgtttgtgtgtttttttttaggatggtagaggcggaattgtataaggaaaggttgtaagttatagtagtaagtttatttttattttatttttttgttttattgtttggggtggaagggggttttcgagggtttcggggtaagcggtatgttagtatagtagtcgtaggttatatgttttaggggttaaaattttgttagggtttagttaggttgtttttttttttttatgtttatagatggagatttttaagggcgcgttttggattgaggatttgaatgtggaagattggtttaaaaaaagatgtttgttgttgggttttggggaaggattaaatagaggtttggggtggggggacgattttaggaatattatgatcgaatgtttaggtatacgttggttttatagtttggagaattaagagaagggtgatttgaacggtggttgttattttttttgcggaagttgtttttttgttaagtggaaaattaggagttagcgatttagttagttacgcggtagaatttttttttagaaatcgggaatgttagtttttttttttttgtttgatattgataagggtattggtataagttattattttggaggtttggggattttatataattgggttttggttataatattttatgagagttttttttttatggtgtggagtatttgaaaatttatttttagtttataaaggagtagttagttttggtaaagttcgtaggtatttttagaaaagtgtatttatgtgtattttgggtttaaaaaagaattttttgagattgtttagatttgagtaattttaatatagtgttgttaatgatttatagatgtggtatttttattggagttattatagttggattatatatttttttcgaggatgagggaatgattattgttgtcgtatgaaatagtaataattaaaaaagaaggttcgttaatatattggtataaaagaatttttagatatttttttatttaaatatatttgtgttttttagttcggaagttttttggaaatatatataaatttgttggagaaatagtgtgtaatgttttggaattaaagtatattaaagcgttttttaaaatttttttggatagattttttattgggaaaatgtatatagatttttttttttttagaagtatttgatatggtttttaaggttt

SEQ ID NO: 128 - DNA, 2792 bp, homo sapiens
aggttttagtgatttttttgttttggttttttaagtagttgggattataggtgtttgttattatgtttggttaattttttgtatttttagtagagaaggggttttattatgttggttaggttggttttgaatttttgattttaggtgatttatttgttttggttttttaaagtgttgggattataggtgtgagttattgtatttggtttgatgtgtatattttttaatatgtttttaaattttatggttttaaagaggttatattagttattttagtgtttattttatttgatgaagaaatgtttgtatatgaatgttgggaattttagtaggttttgttttaatgtgaagaggtatttttttttgtttttggtattgatttttttttggattgggtttgatttattttttatatttagtttaggatttgttataaaagatttatattagtattatatggtattttgttttagtaaagaataggtgaaatattttagtgagtagattttatttttttttttagatgtaatgaatagaagattttgaaaggattttaatttagaatgttataggataataagagtagatgtttgtgatgttttttataaagtatttttatatattgttttttatttgtttttaatgatatttatgtgattttttatttttttagatgaggaaattgaggtttagagtgattaagtgagttgtttgagattttatagttaatatattgtgaaatttagtttagtatttaggattaaaaatttttggttttttttaaggttatatattgttttattagaagggtggtttttttggagatatattttatttttggttgatttgatattgagaatttggttattttaagtatgtgggttatttgggtaaggtagttttttttaaattgtaaatgtttttatgtggagtttaagtgtttggtttgagttagaaggtgttttgaatatttggtggttttagtttttatgtaatagtatgtgtttgggttttatatttggttagatgtttttttttattggtatttgtttggtggaggtgttattgtgttttgtttttgttttagtaagtgtgtgtttatgtgggtgtgttatgttagttgtgtgttttagtggtttgttgtgtgtttgtgttttaggtgtttattggtttgtgtgttttttgtttgtgttttggagatttgtggtggtgattgtttggagttgttttggattgtggttttgggtttattatattttaggggtggagtgaggtattgagatgttagggtggagaattagtgttgggttagtgtgtttttttggtggttgttggtgttttatgtttttggttggtgtggttggtggtggtggtgattgggagatgtagtgagtggtggtgttggggtgtagttaggtggttgggagggtgggggttagaggttgagtttgggtgagtttgttgtgtgtatagttttgtttgttgtttttggagtggatttttagttgtttttgggtgtttttttgggttttagtaaagttttttggggtgtttattagtttttttgggtgattatagtgtgtgttttttttttttttttttttttgtttgtgtgtttttttttaggatggtagaggtggaattgtataaggaaaggttgtaagttatagtagtaagtttatttttattttatttttttgttttattgtttggggtggaagggggtttttgagggttttggggtaagtggtatgttagtatagtagttgtaggttatatgttttaggggttaaaattttgttagggtttagttaggttgtttttttttttttatgtttatagatggagatttttaagggtgtgttttggattgaggatttgaatgtggaagattggtttaaaaaaagatgtttgttgttgggttttggggaaggattaaatagaggtttggggtggggggatgattttaggaatattatgattgaatgtttaggtatatgttggttttatagtttggagaattaagagaagggtgatttgaatggtggttgttattttttttgtggaagttgtttttttgttaagtggaaaattaggagttagtgatttagttagttatgtggtagaatttttttttagaaattgggaatgttagtttttttttttttgtttgatattgataagggtattggtataagttattattttggaggtttggggattttatataattgggttttggttataatattttatgagagttttttttttatggtgtggagtatttgaaaatttatttttagtttataaaggagtagttagttttggtaaagtttgtaggtatttttagaaaagtgtatttatgtgtattttgggtttaaaaaagaattttttgagattgtttagatttgagtaattttaatatagtgttgttaatgatttatagatgtggtatttttattggagttattatagttggattatatattttttttgaggatgagggaatgattattgttgttgtatgaaatagtaataattaaaaaagaaggtttgttaatatattggtataaaagaatttttagatatttttttatttaaatatatttgtgttttttagtttggaagttttttggaaatatatataaatttgttggagaaatagtgtgtaatgttttggaattaaagtatattaaagtgttttttaaaatttttttggatagattttttattgggaaaatgtatatagatttttttttttttagaagtatttgatatggtttttaaggttt

SEQ ID NO: 129 - DNA, 2792 bp, homo sapiens
gagttttggagattatgttaaatgtttttaaaaaaggaagggtttgtgtgtatttttttaatgaagaatttgtttaaaaaggttttggaaaacgttttaatatattttggttttaaaatattatatattatttttttaataaatttatatgtgtttttagagaattttcgaattgaaaaatataaatgtatttaggtggaagaatgtttggagatttttttatgttaatatgttaacggatttttttttttaattgttattattttatacggtagtagtaattatttttttattttcgaaggaaatatataatttagttgtggtggttttagtaaaaatattatatttgtggattattggtaatattgtgttaagattgtttaaatttaggtagttttagagagtttttttttaaatttaagatgtatatgggtatatttttttgaaagtgtttacgaattttgttaaaattgattatttttttgtaggttgaaaataggtttttagatattttatattataagaaggaggtttttatggaatattataattaggatttagttgtatgaagtttttagatttttagggtggtggtttgtgttagtgtttttgttaatattaaatagagaagggaaaattaatattttcggtttttgggaggaggttttatcgcgtggttggttgagtcgttgatttttggttttttatttaataggaggatagttttcgtagagaggatggtagttatcgtttaggttattttttttttggttttttaggttatgaagttaacgtatgtttgagtattcggttataatatttttggagtcgtttttttattttaagtttttgtttagtttttttttaaagtttagtagtaagtatttttttttaagttaattttttatatttaaatttttagtttaaagcgcgtttttgggggtttttatttatagatatagaaaagaaaaggtagtttagttgagttttgatagagttttagtttttggaatatatgatttgcggttattgtgttggtatgtcgtttgtttcgaaattttcgggggtttttttttattttagataatagagtaagaaaataaaatgaaagtggatttattgttatggtttgtagtttttttttgtgtaatttcgtttttgttattttggagaagggtatataggtaggggaaagaggaaagaaaaaatatacgttgtagttatttaaggaaattgatgggtatttcggggggttttgttagaattcgggagaacgtttagggacggttggggattcgttttaggggcggcgggtagagttgtgcgtacggcgggttcgttcgggtttagtttttggttttcgttttttcggtcgtttggttgcgttttagcgtcgtcgtttattgtatttttcggtcgtcgtcgtcgtcggtcgcgttagtcgaggacgtgggacgtcggtagtcgtcgggagggcgcgttagttcggcgttagtttttcgttttgacgtttcggtgtttcgtttcgtttttggagtgtgatggattcgaggtcgcggtttaaggcggtttcgagcgatcgtcgtcgcgggtttttaaggcgtagacggagggcgcgcgagttagtgggtatttggggcgcgggcgtacggcgagtcgttggggcgtacggttggcgtggcgcgttcgcgtggatacgcgtttgttggggcggaggtagagcgtagtggcgtttttatcgggtagatgttagtggagaggggcgtttgatcgaatgtgggattcgagtacgtgttgttacgtgggggttggggttatcgagtgtttagggtattttttggtttaagttagacgtttgagttttacgtggggatatttataatttgggaagggttgttttgtttaagtggtttatatgtttaagatgattaagtttttaatattaagtcggtcgagggtagggtatatttttagagaggttatttttttggtgaggcgatatgtggttttaaaagaagtcgagagtttttagttttgggtgttagattagattttataatgtgttagttgtgaaattttaggtaattcgtttaattattttgaattttagtttttttatttgaaaaaatggaggattatataggtgttattagagacgaatgagagatagtatgtaaaggtgttttgtaaagggtattatagatatttgtttttattattttgtgatattttggattgaaatttttttagggttttttgtttattgtatttgaaaggaaaagtaggatttatttattaaaatattttatttattttttattaaaataggatattatgtggtattaatgtgagttttttgtgataggttttggattggatgtaagaagtggattaggtttagtttaaaaggagattaatgttaaaagtaaaaaaaaatgtttttttatattgaggtaggatttgttagaatttttaatatttatatgtaaacgtttttttattaaatgaaataaatattgaaataattaatatggtttttttagagttataggatttaaaggtatgttaaaagatatatatattaggttagatgcggtggtttatatttgtaattttagtattttgggaggttaaggcgggtggattatttaaggttaggagttcgagattagtttggttaatatggtgaaattttttttttattaaaaatataaaaaattagtcgggcgtggtggtaggtatttgtaattttagttatttgggaagtcgaggtaggagaattattggaattt

SEQ ID NO: 130 - DNA, 2792 bp, homo sapiens
gagttttggagattatgttaaatgtttttaaaaaaggaagggtttgtgtgtatttttttaatgaagaatttgtttaaaaaggttttggaaaatgttttaatatattttggttttaaaatattatatattatttttttaataaatttatatgtgtttttagagaatttttgaattgaaaaatataaatgtatttaggtggaagaatgtttggagatttttttatgttaatatgttaatggatttttttttttaattgttattattttatatggtagtagtaattatttttttatttttgaaggaaatatataatttagttgtggtggttttagtaaaaatattatatttgtggattattggtaatattgtgttaagattgtttaaatttaggtagttttagagagtttttttttaaatttaagatgtatatgggtatatttttttgaaagtgtttatgaattttgttaaaattgattatttttttgtaggttgaaaataggtttttagatattttatattataagaaggaggtttttatggaatattataattaggatttagttgtatgaagtttttagatttttagggtggtggtttgtgttagtgtttttgttaatattaaatagagaagggaaaattaatatttttggtttttgggaggaggttttattgtgtggttggttgagttgttgatttttggttttttatttaataggaggatagtttttgtagagaggatggtagttattgtttaggttattttttttttggttttttaggttatgaagttaatgtatgtttgagtatttggttataatatttttggagttgtttttttattttaagtttttgtttagtttttttttaaagtttagtagtaagtatttttttttaagttaattttttatatttaaatttttagtttaaagtgtgtttttgggggtttttatttatagatatagaaaagaaaaggtagtttagttgagttttgatagagttttagtttttggaatatatgatttgtggttattgtgttggtatgttgtttgttttgaaatttttgggggtttttttttattttagataatagagtaagaaaataaaatgaaagtggatttattgttatggtttgtagtttttttttgtgtaattttgtttttgttattttggagaagggtatataggtaggggaaagaggaaagaaaaaatatatgttgtagttatttaaggaaattgatgggtattttggggggttttgttagaatttgggagaatgtttagggatggttggggatttgttttaggggtggtgggtagagttgtgtgtatggtgggtttgtttgggtttagtttttggtttttgtttttttggttgtttggttgtgttttagtgttgttgtttattgtattttttggttgttgttgttgttggttgtgttagttgaggatgtgggatgttggtagttgttgggagggtgtgttagtttggtgttagttttttgttttgatgttttggtgttttgttttgtttttggagtgtgatggatttgaggttgtggtttaaggtggttttgagtgattgttgttgtgggtttttaaggtgtagatggagggtgtgtgagttagtgggtatttggggtgtgggtgtatggtgagttgttggggtgtatggttggtgtggtgtgtttgtgtggatatgtgtttgttggggtggaggtagagtgtagtggtgtttttattgggtagatgttagtggagaggggtgtttgattgaatgtgggatttgagtatgtgttgttatgtgggggttggggttattgagtgtttagggtattttttggtttaagttagatgtttgagttttatgtggggatatttataatttgggaagggttgttttgtttaagtggtttatatgtttaagatgattaagtttttaatattaagttggttgagggtagggtatatttttagagaggttatttttttggtgaggtgatatgtggttttaaaagaagttgagagtttttagttttgggtgttagattagattttataatgtgttagttgtgaaattttaggtaatttgtttaattattttgaattttagtttttttatttgaaaaaatggaggattatataggtgttattagagatgaatgagagatagtatgtaaaggtgttttgtaaagggtattatagatatttgtttttattattttgtgatattttggattgaaatttttttagggttttttgtttattgtatttgaaaggaaaagtaggatttatttattaaaatattttatttattttttattaaaataggatattatgtggtattaatgtgagttttttgtgataggttttggattggatgtaagaagtggattaggtttagtttaaaaggagattaatgttaaaagtaaaaaaaaatgtttttttatattgaggtaggatttgttagaatttttaatatttatatgtaaatgtttttttattaaatgaaataaatattgaaataattaatatggtttttttagagttataggatttaaaggtatgttaaaagatatatatattaggttagatgtggtggtttatatttgtaattttagtattttgggaggttaaggtgggtggattatttaaggttaggagtttgagattagtttggttaatatggtgaaattttttttttattaaaaatataaaaaattagttgggtgtggtggtaggtatttgtaattttagttatttgggaagttgaggtaggagaattattggaattt

SEQ ID NO: 131 - DNA, 2673 bp, homo sapiens
ttatgatctccgaattcacatagaatttctctgtgaagggaaacctggagttgatacagaatttccttccacaaaacagctctttgaatcttcactgggtttgactttgcatctcactctcctgaggaaaacgaggagcagtgaatccactgagaacattttgcacggttctcttcccagccccttgacatatggagcagtctcccatctagagccaccatacagagttgactggcaggaaagccctagccctgtggcttgcatatctgagccctctcccctttcaaccccagtccctcaggaaggctttccctgaacacctacctaggcacatccacttcccttttattctccatcaaagcatttttttaaaaaaacacgtctttattaagacataattcatagaccacaaaattcacccagagtgtataattcaatagctttcagtatgttcagttgcacaatcatcaccaaaaattaattctagaacattcatcacagcatctaattacttaatttttatagcaatattttcagcctgtgacgatatgtttatttttgtctttatctgtgctttgcctttctactttaacccgtgagctcctgcagggcagggactgtgatggctatgcttatgcttggtgctgcgttttcagcacctggcagacaccgactcacagagggacccggctgcaagatagaagaaaagcctgaagctgtcccatctactctgtattgtagcaggtgcaggacacctggatgacaaccaggtccctgctctggaaaccgttaggagtagaggattctcagagggggtggaggcagggtgtgcgtactccaggtggcttattaccgcggggccggggccgtggtaatttgggaaaccatagtcaatatagctattgttttcaaatagcagactagggaaactgaccctggacaatgtcttcctggcaggcgggaacacgcagaatttggagtgaaacggaaaggggcatggggtcgccaaggtggtgaaacgccgcattaaggcgcttcaagatagctggagttttgcttgggaaactcagagggatctcgcccggccggcacaatggcgtttctgaacccatgcccagcccactgggggcagtccttgctgcttgcagaggccagacgcttcttgcaacttctaagcggcgagagctgccaccttgccaatgactcaaccgtttgcctatgccctctgggctgtgccaccagccgcagccgccctgctcccccacccacccttctccccaggctccgcgccgcgccgccagtcccaggggagccgccggcgcacctggcgcctagggcgcacggcactgcgcgctggtgggcacctcacccgacgccagctgccagcgcgctccctccccgaaaccctgaagtggggtgtcttgtctagcgcccagcgaacaacattatccaattgcttcccgttttattcgcaggctgggagctgagagagcctgagcattcactttcaaccctccaggggaggagggggtgcgggtggggaggggagacggctcccagctccacctcgcgcgcggcgcggccagtgcactcggctccgggagaggcgagcagcgccggtgagccccgcagcagcgcacccggccgcggagccccgcgatggagtgagtatccccgagccgcgccgccagctgctctcctctcggcatgttgccatggtgaccgcggcggcaggcagatcccgctcgggtccgcgtccaggatgggtgtttaatttcagccccgtgtgtacgcctggtgtttctatagcagccgccgcggcggcaggaggcaaggggtgggagccccgggtggcgtggtttttgcggctgccccttggctagcagggcctggggggcgagtgaggggagtagatgatgttgctaaggacggaggcatattctaggctttcctatctctgccccaagcttccgcttatcggggagttggccgcaatagccatgacttccgattcctaaccatgtcagcattattggactgcagttaaaaaaagagggagggggtcactgcggatcggaagcaaacgcggttcagtgtgaagcgtgtaatggaaggatgagttagtgggtaatatgagccagggctgcaatgtcctggctactagaaaccatcagaagacccaaaagaattgatttgttcctggggtattggagaaataagacaaacatattggcggcagcccggagtggaattacaacgtttggcaccgtgaatacggcatggatgggtggggaagacaagagaggcattaaccagaaaagacattaaataaagggctccggttgtgggtctggtctaggattcctctcttctctgtgtttgcatccctacattgctttttggacactctctcgagctgctgccacagcaggaccactctgacaggcgacagccagccactccaaggaagggtcatttttggagccagctattagatcccgctcacttggtcagcttctcctcttccgttctcttcccacactactccttgacattgaggccgtctgaaatcatatttcaagttagagataaagtcatgttttcagacatcaggaccttcgtaccaaacccaagaaaccttagatgcagcctttatccctctgcgtatctgat

SEQ ID NO: 132 - DNA, 2673 bp, homo sapiens
ttatgattttcgaatttatatagaatttttttgtgaagggaaatttggagttgatatagaatttttttttataaaatagttttttgaatttttattgggtttgattttgtattttatttttttgaggaaaacgaggagtagtgaatttattgagaatattttgtacggttttttttttagttttttgatatatggagtagttttttatttagagttattatatagagttgattggtaggaaagttttagttttgtggtttgtatatttgagttttttttttttttaattttagttttttaggaaggttttttttgaatatttatttaggtatatttattttttttttattttttattaaagtatttttttaaaaaaatacgtttttattaagatataatttatagattataaaatttatttagagtgtataatttaatagtttttagtatgtttagttgtataattattattaaaaattaattttagaatatttattatagtatttaattatttaatttttatagtaatatttttagtttgtgacgatatgtttatttttgtttttatttgtgttttgtttttttattttaattcgtgagtttttgtagggtagggattgtgatggttatgtttatgtttggtgttgcgtttttagtatttggtagatatcgatttatagagggattcggttgtaagatagaagaaaagtttgaagttgttttatttattttgtattgtagtaggtgtaggatatttggatgataattaggtttttgttttggaaatcgttaggagtagaggatttttagagggggtggaggtagggtgtgcgtattttaggtggtttattatcgcggggtcggggtcgtggtaatttgggaaattatagttaatatagttattgtttttaaatagtagattagggaaattgattttggataatgtttttttggtaggcgggaatacgtagaatttggagtgaaacggaaaggggtatggggtcgttaaggtggtgaaacgtcgtattaaggcgttttaagatagttggagttttgtttgggaaatttagagggatttcgttcggtcggtataatggcgtttttgaatttatgtttagtttattgggggtagtttttgttgtttgtagaggttagacgttttttgtaatttttaagcggcgagagttgttattttgttaatgatttaatcgtttgtttatgttttttgggttgtgttattagtcgtagtcgttttgtttttttatttatttttttttttaggtttcgcgtcgcgtcgttagttttaggggagtcgtcggcgtatttggcgtttagggcgtacggtattgcgcgttggtgggtattttattcgacgttagttgttagcgcgtttttttttcgaaattttgaagtggggtgttttgtttagcgtttagcgaataatattatttaattgtttttcgttttattcgtaggttgggagttgagagagtttgagtatttatttttaattttttaggggaggagggggtgcgggtggggaggggagacggtttttagttttatttcgcgcgcggcgcggttagtgtattcggtttcgggagaggcgagtagcgtcggtgagtttcgtagtagcgtattcggtcgcggagtttcgcgatggagtgagtattttcgagtcgcgtcgttagttgtttttttttcggtatgttgttatggtgatcgcggcggtaggtagatttcgttcgggttcgcgtttaggatgggtgtttaattttagtttcgtgtgtacgtttggtgtttttatagtagtcgtcgcggcggtaggaggtaaggggtgggagtttcgggtggcgtggtttttgcggttgttttttggttagtagggtttggggggcgagtgaggggagtagatgatgttgttaaggacggaggtatattttaggtttttttatttttgttttaagttttcgtttatcggggagttggtcgtaatagttatgattttcgatttttaattatgttagtattattggattgtagttaaaaaaagagggagggggttattgcggatcggaagtaaacgcggtttagtgtgaagcgtgtaatggaaggatgagttagtgggtaatatgagttagggttgtaatgttttggttattagaaattattagaagatttaaaagaattgatttgtttttggggtattggagaaataagataaatatattggcggtagttcggagtggaattataacgtttggtatcgtgaatacggtatggatgggtggggaagataagagaggtattaattagaaaagatattaaataaagggtttcggttgtgggtttggtttaggattttttttttttttgtgtttgtatttttatattgttttttggatattttttcgagttgttgttatagtaggattattttgataggcgatagttagttattttaaggaagggttatttttggagttagttattagatttcgtttatttggttagttttttttttttcgttttttttttatattattttttgatattgaggtcgtttgaaattatattttaagttagagataaagttatgtttttagatattaggattttcgtattaaatttaagaaattttagatgtagtttttatttttttgcgtatttgat

SEQ ID NO: 133 - DNA, 2673 bp, homo sapiens
ttatgatttttgaatttatatagaatttttttgtgaagggaaatttggagttgatatagaatttttttttataaaatagttttttgaatttttattgggtttgattttgtattttatttttttgaggaaaatgaggagtagtgaatttattgagaatattttgtatggttttttttttagttttttgatatatggagtagttttttatttagagttattatatagagttgattggtaggaaagttttagttttgtggtttgtatatttgagttttttttttttttaattttagttttttaggaaggttttttttgaatatttatttaggtatatttattttttttttattttttattaaagtatttttttaaaaaaatatgtttttattaagatataatttatagattataaaatttatttagagtgtataatttaatagtttttagtatgtttagttgtataattattattaaaaattaattttagaatatttattatagtatttaattatttaatttttatagtaatatttttagtttgtgatgatatgtttatttttgtttttatttgtgttttgtttttttattttaatttgtgagtttttgtagggtagggattgtgatggttatgtttatgtttggtgttgtgtttttagtatttggtagatattgatttatagagggatttggttgtaagatagaagaaaagtttgaagttgttttatttattttgtattgtagtaggtgtaggatatttggatgataattaggtttttgttttggaaattgttaggagtagaggatttttagagggggtggaggtagggtgtgtgtattttaggtggtttattattgtggggttggggttgtggtaatttgggaaattatagttaatatagttattgtttttaaatagtagattagggaaattgattttggataatgtttttttggtaggtgggaatatgtagaatttggagtgaaatggaaaggggtatggggttgttaaggtggtgaaatgttgtattaaggtgttttaagatagttggagttttgtttgggaaatttagagggattttgtttggttggtataatggtgtttttgaatttatgtttagtttattgggggtagtttttgttgtttgtagaggttagatgttttttgtaatttttaagtggtgagagttgttattttgttaatgatttaattgtttgtttatgttttttgggttgtgttattagttgtagttgttttgtttttttatttatttttttttttaggttttgtgttgtgttgttagttttaggggagttgttggtgtatttggtgtttagggtgtatggtattgtgtgttggtgggtattttatttgatgttagttgttagtgtgttttttttttgaaattttgaagtggggtgttttgtttagtgtttagtgaataatattatttaattgttttttgttttatttgtaggttgggagttgagagagtttgagtatttatttttaattttttaggggaggagggggtgtgggtggggaggggagatggtttttagttttattttgtgtgtggtgtggttagtgtatttggttttgggagaggtgagtagtgttggtgagttttgtagtagtgtatttggttgtggagttttgtgatggagtgagtatttttgagttgtgttgttagttgttttttttttggtatgttgttatggtgattgtggtggtaggtagattttgtttgggtttgtgtttaggatgggtgtttaattttagttttgtgtgtatgtttggtgtttttatagtagttgttgtggtggtaggaggtaaggggtgggagttttgggtggtgtggtttttgtggttgttttttggttagtagggtttggggggtgagtgaggggagtagatgatgttgttaaggatggaggtatattttaggtttttttatttttgttttaagtttttgtttattggggagttggttgtaatagttatgatttttgatttttaattatgttagtattattggattgtagttaaaaaaagagggagggggttattgtggattggaagtaaatgtggtttagtgtgaagtgtgtaatggaaggatgagttagtgggtaatatgagttagggttgtaatgttttggttattagaaattattagaagatttaaaagaattgatttgtttttggggtattggagaaataagataaatatattggtggtagtttggagtggaattataatgtttggtattgtgaatatggtatggatgggtggggaagataagagaggtattaattagaaaagatattaaataaagggttttggttgtgggtttggtttaggattttttttttttttgtgtttgtatttttatattgttttttggatatttttttgagttgttgttatagtaggattattttgataggtgatagttagttattttaaggaagggttatttttggagttagttattagattttgtttatttggttagtttttttttttttgttttttttttatattattttttgatattgaggttgtttgaaattatattttaagttagagataaagttatgtttttagatattaggatttttgtattaaatttaagaaattttagatgtagtttttatttttttgtgtatttgat

SEQ ID NO: 134 - DNA, 2673 bp, homo sapiens
attagatacgtagagggataaaggttgtatttaaggttttttgggtttggtacgaaggttttgatgtttgaaaatatgattttatttttaatttgaaatatgattttagacggttttaatgttaaggagtagtgtgggaagagaacggaagaggagaagttgattaagtgagcgggatttaatagttggttttaaaaatgatttttttttggagtggttggttgtcgtttgttagagtggttttgttgtggtagtagttcgagagagtgtttaaaaagtaatgtagggatgtaaatatagagaagagaggaattttagattagatttataatcggagttttttatttaatgttttttttggttaatgttttttttgttttttttatttatttatgtcgtatttacggtgttaaacgttgtaattttatttcgggttgtcgttaatatgtttgttttatttttttaatattttaggaataaattaatttttttgggttttttgatggtttttagtagttaggatattgtagttttggtttatattatttattaatttatttttttattatacgttttatattgaatcgcgtttgttttcgattcgtagtgattttttttttttttttttaattgtagtttaataatgttgatatggttaggaatcggaagttatggttattgcggttaatttttcgataagcggaagtttggggtagagataggaaagtttagaatatgttttcgtttttagtaatattatttattttttttattcgttttttaggttttgttagttaaggggtagtcgtaaaaattacgttattcggggtttttattttttgttttttgtcgtcgcggcggttgttatagaaatattaggcgtatatacggggttgaaattaaatatttattttggacgcggattcgagcgggatttgtttgtcgtcgcggttattatggtaatatgtcgagaggagagtagttggcggcgcggttcggggatatttattttatcgcggggtttcgcggtcgggtgcgttgttgcggggtttatcggcgttgttcgtttttttcggagtcgagtgtattggtcgcgtcgcgcgcgaggtggagttgggagtcgttttttttttttattcgtattttttttttttttggagggttgaaagtgaatgtttaggtttttttagtttttagtttgcgaataaaacgggaagtaattggataatgttgttcgttgggcgttagataagatattttattttagggtttcggggagggagcgcgttggtagttggcgtcgggtgaggtgtttattagcgcgtagtgtcgtgcgttttaggcgttaggtgcgtcggcggtttttttgggattggcggcgcggcgcggagtttggggagaagggtgggtgggggagtagggcggttgcggttggtggtatagtttagagggtataggtaaacggttgagttattggtaaggtggtagttttcgtcgtttagaagttgtaagaagcgtttggtttttgtaagtagtaaggattgtttttagtgggttgggtatgggtttagaaacgttattgtgtcggtcgggcgagatttttttgagttttttaagtaaaattttagttattttgaagcgttttaatgcggcgttttattattttggcgattttatgttttttttcgttttattttaaattttgcgtgttttcgtttgttaggaagatattgtttagggttagtttttttagtttgttatttgaaaataatagttatattgattatggttttttaaattattacggtttcggtttcgcggtaataagttatttggagtacgtatattttgtttttattttttttgagaattttttatttttaacggtttttagagtagggatttggttgttatttaggtgttttgtatttgttataatatagagtagatgggatagttttaggttttttttttattttgtagtcgggtttttttgtgagtcggtgtttgttaggtgttgaaaacgtagtattaagtataagtatagttattatagtttttgttttgtaggagtttacgggttaaagtagaaaggtaaagtatagataaagataaaaataaatatatcgttataggttgaaaatattgttataaaaattaagtaattagatgttgtgatgaatgttttagaattaatttttggtgatgattgtgtaattgaatatattgaaagttattgaattatatattttgggtgaattttgtggtttatgaattatgttttaataaagacgtgtttttttaaaaaaatgttttgatggagaataaaagggaagtggatgtgtttaggtaggtgtttagggaaagtttttttgagggattggggttgaaaggggagagggtttagatatgtaagttatagggttagggtttttttgttagttaattttgtatggtggttttagatgggagattgttttatatgttaaggggttgggaagagaatcgtgtaaaatgtttttagtggatttattgtttttcgttttttttaggagagtgagatgtaaagttaaatttagtgaagatttaaagagttgttttgtggaaggaaattttgtattaattttaggtttttttttatagagaaattttatgtgaattcggagattataa

SEQ ID NO: 135 - DNA, 2673 bp, homo sapiens
attagatatgtagagggataaaggttgtatttaaggttttttgggtttggtatgaaggttttgatgtttgaaaatatgattttatttttaatttgaaatatgattttagatggttttaatgttaaggagtagtgtgggaagagaatggaagaggagaagttgattaagtgagtgggatttaatagttggttttaaaaatgatttttttttggagtggttggttgttgtttgttagagtggttttgttgtggtagtagtttgagagagtgtttaaaaagtaatgtagggatgtaaatatagagaagagaggaattttagattagatttataattggagttttttatttaatgttttttttggttaatgttttttttgttttttttatttatttatgttgtatttatggtgttaaatgttgtaattttattttgggttgttgttaatatgtttgttttatttttttaatattttaggaataaattaatttttttgggttttttgatggtttttagtagttaggatattgtagttttggtttatattatttattaatttatttttttattatatgttttatattgaattgtgtttgtttttgatttgtagtgattttttttttttttttttaattgtagtttaataatgttgatatggttaggaattggaagttatggttattgtggttaattttttgataagtggaagtttggggtagagataggaaagtttagaatatgtttttgtttttagtaatattatttattttttttatttgttttttaggttttgttagttaaggggtagttgtaaaaattatgttatttggggtttttattttttgttttttgttgttgtggtggttgttatagaaatattaggtgtatatatggggttgaaattaaatatttattttggatgtggatttgagtgggatttgtttgttgttgtggttattatggtaatatgttgagaggagagtagttggtggtgtggtttggggatatttattttattgtggggttttgtggttgggtgtgttgttgtggggtttattggtgttgtttgttttttttggagttgagtgtattggttgtgttgtgtgtgaggtggagttgggagttgttttttttttttatttgtattttttttttttttggagggttgaaagtgaatgtttaggtttttttagtttttagtttgtgaataaaatgggaagtaattggataatgttgtttgttgggtgttagataagatattttattttagggttttggggagggagtgtgttggtagttggtgttgggtgaggtgtttattagtgtgtagtgttgtgtgttttaggtgttaggtgtgttggtggtttttttgggattggtggtgtggtgtggagtttggggagaagggtgggtgggggagtagggtggttgtggttggtggtatagtttagagggtataggtaaatggttgagttattggtaaggtggtagtttttgttgtttagaagttgtaagaagtgtttggtttttgtaagtagtaaggattgtttttagtgggttgggtatgggtttagaaatgttattgtgttggttgggtgagatttttttgagttttttaagtaaaattttagttattttgaagtgttttaatgtggtgttttattattttggtgattttatgtttttttttgttttattttaaattttgtgtgtttttgtttgttaggaagatattgtttagggttagtttttttagtttgttatttgaaaataatagttatattgattatggttttttaaattattatggttttggttttgtggtaataagttatttggagtatgtatattttgtttttattttttttgagaattttttatttttaatggtttttagagtagggatttggttgttatttaggtgttttgtatttgttataatatagagtagatgggatagttttaggttttttttttattttgtagttgggtttttttgtgagttggtgtttgttaggtgttgaaaatgtagtattaagtataagtatagttattatagtttttgttttgtaggagtttatgggttaaagtagaaaggtaaagtatagataaagataaaaataaatatattgttataggttgaaaatattgttataaaaattaagtaattagatgttgtgatgaatgttttagaattaatttttggtgatgattgtgtaattgaatatattgaaagttattgaattatatattttgggtgaattttgtggtttatgaattatgttttaataaagatgtgtttttttaaaaaaatgttttgatggagaataaaagggaagtggatgtgtttaggtaggtgtttagggaaagtttttttgagggattggggttgaaaggggagagggtttagatatgtaagttatagggttagggtttttttgttagttaattttgtatggtggttttagatgggagattgttttatatgttaaggggttgggaagagaattgtgtaaaatgtttttagtggatttattgttttttgttttttttaggagagtgagatgtaaagttaaatttagtgaagatttaaagagttgttttgtggaaggaaattttgtattaattttaggtttttttttatagagaaattttatgtgaatttggagattataa

SEQ ID NO: 136 - DNA, 50 bp, homo sapiens
agaacttggacgccaggactgtagcagacagagtccggcttcggggttcg

SEQ ID NO: 137 - DNA, 50 bp, homo sapiens
agaatttggacgttaggattgtagtagatagagttcggtttcggggttcg

SEQ ID NO: 138 - DNA, 50 bp, homo sapiens
agaatttggatgttaggattgtagtagatagagtttggttttggggtttg

SEQ ID NO: 139 - DNA, 50 bp, homo sapiens
cgaatttcgaagtcggattttgtttgttatagttttggcgtttaagtttt

SEQ ID NO: 140 - DNA, 50 bp, homo sapiens
tgaattttgaagttggattttgtttgttatagttttggtgtttaagtttt

SEQ ID NO: 141 - DNA, 3001 bp, homo sapiens
aagtctttgctattgtgaatagtgccgcaataaacatatgtgtgcatgtgtctttatagcagcatgatttatagtcctttgggtatatacccagtaatgggatggctgggtcaaatggtatttctagatccctgaggaattgccacaccgacttccacaagggttgaactagtttacagtcccaccaacagtgtaaaagtgttcctatttctccacatcctctccagcacctgttgtttcctgactttttaatgattaccattctaactggtgtgagatggtatctcactgtggttttgatttgcatttctctgatggccagtgatggtgagcattttttcatgtgttttttggctgcataaatgtcttcttttgagaagtgtctgttcacgtccttcgcccactttttgatggggttgctaaactttttttttttaaaaaagtttaaaatattggccgggcgcagtggctcacgcctgtaatcctagcactttgggaggccgaggcgggaggatcacgaggtcaggagttcgagaccagcctggccatcgtggtgaaaccctgtctctactaaaaatacaaaagttagctggacgtggtggcgggcgcctgtaatcccaccttcttggaaggctgatgcaggagaattgcttgaactcgggaggcggaggttgcagtgagccgagattgtgccacggcactccagcctgggcgaaagagcgagactctgtctcaagaaaaacacacacacacacacacacacacacacacacacacacaaacaaaagtttaaaatatcaattaggtatatttgtatttaactgtttcatgaatctttgtttctaacctttctcctataacccattctttttttttttttttttttgagacaaggtcttgctctgttgcccaggctggatggagtgcagtggcgcgatcatagctcactgtggcctcaaactccctgctcaagtgatcctccagactcccaagcagctgggactacaggtgcgcaccacgcctccaggctaattaaaaaaatttttcttttgtggagacagggtctcgctatattgcccaggctggtttcaaactcttgggctccagcaatcctgtcgcctcgcctcccaaagtgctgggattacaggcgcgagtggccgctggggttcttaacttgggtctttgaatcgccttaagaagtgtctctgaatctgggaattgcaagcaacgtttctgtgaggaccttcacacagttcatccactcttcgaagagtatggaccgaaaaaggcatagagcattcactgcacgtagagaaaatcagcaacccctgctccccaccctcagcctgaggtgcctacctccacgtggggtcaggaggcggaagcgaaaccagaagaaaaaaccctgagatctataaggcagttcaggtccctagtgacatgagctaaagagaacttggacgccaggactgtagcagacagagtccggcttcggggttcgcatcagtcgcacggaaggtggaaatagcccccaagttgtaacccgccgcggtcttccctcaacagcgcaggcgccaggactgctaggacgccgcgcacctcccgcgatgccccgccccggcgcgaggcaagacgggaaagtcaagatggacgcgtccatttgaacgtctcgcacgccttcctgccattagcactcgagcccgctgctgttgcccgttcttcctccagaataggggagggagagggaatgagaagctgctgcggcccaagagtcactgtgaaggaccccgccgctgccctcgggcctcctcggcccctgcgcctccggggagcagccggggctcgccgcgcctgacgcgtcccgagttatacaggtgcgggcgccgtaccgcagcacttggtggtctgtcgcgcgccgcgtgactctcgcacccgtcccgaggccgagcctcccctggtggccgtaggtctggaaacccggggtactgggaacccgagggagggccttgagcgtgctccggggctgagggggcctgcgggcgctcctggcctgcgggctggggtgctccttccggctcctgcttgccaacctctttcctgagctgtgcgtagcatcccatgtgcagcctcagctttcagactggcctccagcccctctgagctgtttttctgagcctcgggctctcagcctgttttcaccgtcctctagaaaggctggggaagctcttgtggagacttaagctcccgttagtgtgcatttgggtctcttttttttttttttggcagggtagtgtttgtaggaatcattgctgatactgttatttatagcatataaatttaatagtatttttacgtgtagctgtttatgttgcacctaacaagtaaaaacatttctaaaagtttggggtactgaaaaagtattaaatatgtggcattaatcggtacaaaatgataattctttaacaattctgtaattttctctcaaagttataagaaaataacattataaaattgcagaactaaagtttcataaagtcaaaagttcgttgatgttggttattctgttgaataaaatataggaagaccagctgaattttgttttcttttaaggtttttttttttgtggggttttctttttttttttttttttgagaaggagtcttgttctgtctcctaggctggagtgcagtggcgccatctcagctcactgtaacctctggctcccgtgttcaagcaattctctgcttcagcctcccaagtagctgggattacaggcgcccgccatcactgtctggctaatttttgtatttttagtagagatggggtttcaccatcttggccaggctgatcttgaactcctgacctcgtgatccacccgtctcggccacccaaagtgctgggattacaggcgtgagccaccacgccctgccccttgtaagttttataaggcactttttacttgtgttccaagttcaagtgtcccagtactcatttatttcta

SEQ ID NO: 142 - DNA, 3001 bp, homo sapiens
aagtttttgttattgtgaatagtgtcgtaataaatatatgtgtgtatgtgtttttatagtagtatgatttatagttttttgggtatatatttagtaatgggatggttgggttaaatggtatttttagatttttgaggaattgttatatcgatttttataagggttgaattagtttatagttttattaatagtgtaaaagtgtttttatttttttatattttttttagtatttgttgttttttgattttttaatgattattattttaattggtgtgagatggtattttattgtggttttgatttgtatttttttgatggttagtgatggtgagtatttttttatgtgttttttggttgtataaatgtttttttttgagaagtgtttgtttacgtttttcgtttattttttgatggggttgttaaattttttttttttaaaaaagtttaaaatattggtcgggcgtagtggtttacgtttgtaattttagtattttgggaggtcgaggcgggaggattacgaggttaggagttcgagattagtttggttatcgtggtgaaattttgtttttattaaaaatataaaagttagttggacgtggtggcgggcgtttgtaattttatttttttggaaggttgatgtaggagaattgtttgaattcgggaggcggaggttgtagtgagtcgagattgtgttacggtattttagtttgggcgaaagagcgagattttgttttaagaaaaatatatatatatatatatatatatatatatatatatataaataaaagtttaaaatattaattaggtatatttgtatttaattgttttatgaatttttgtttttaattttttttttataatttattttttttttttttttttttttgagataaggttttgttttgttgtttaggttggatggagtgtagtggcgcgattatagtttattgtggttttaaattttttgtttaagtgattttttagatttttaagtagttgggattataggtgcgtattacgtttttaggttaattaaaaaaattttttttttgtggagatagggtttcgttatattgtttaggttggttttaaatttttgggttttagtaattttgtcgtttcgttttttaaagtgttgggattataggcgcgagtggtcgttggggtttttaatttgggtttttgaatcgttttaagaagtgtttttgaatttgggaattgtaagtaacgtttttgtgaggatttttatatagtttatttatttttcgaagagtatggatcgaaaaaggtatagagtatttattgtacgtagagaaaattagtaatttttgttttttatttttagtttgaggtgtttatttttacgtggggttaggaggcggaagcgaaattagaagaaaaaattttgagatttataaggtagtttaggtttttagtgatatgagttaaagagaatttggacgttaggattgtagtagatagagttcggtttcggggttcgtattagtcgtacggaaggtggaaatagtttttaagttgtaattcgtcgcggtttttttttaatagcgtaggcgttaggattgttaggacgtcgcgtatttttcgcgatgtttcgtttcggcgcgaggtaagacgggaaagttaagatggacgcgtttatttgaacgtttcgtacgtttttttgttattagtattcgagttcgttgttgttgttcgttttttttttagaataggggagggagagggaatgagaagttgttgcggtttaagagttattgtgaaggatttcgtcgttgttttcgggttttttcggtttttgcgttttcggggagtagtcggggttcgtcgcgtttgacgcgtttcgagttatataggtgcgggcgtcgtatcgtagtatttggtggtttgtcgcgcgtcgcgtgattttcgtattcgtttcgaggtcgagttttttttggtggtcgtaggtttggaaattcggggtattgggaattcgagggagggttttgagcgtgtttcggggttgagggggtttgcgggcgtttttggtttgcgggttggggtgtttttttcggtttttgtttgttaattttttttttgagttgtgcgtagtattttatgtgtagttttagtttttagattggtttttagtttttttgagttgtttttttgagtttcgggtttttagtttgtttttatcgttttttagaaaggttggggaagtttttgtggagatttaagttttcgttagtgtgtatttgggttttttttttttttttttggtagggtagtgtttgtaggaattattgttgatattgttatttatagtatataaatttaatagtatttttacgtgtagttgtttatgttgtatttaataagtaaaaatatttttaaaagtttggggtattgaaaaagtattaaatatgtggtattaatcggtataaaatgataattttttaataattttgtaatttttttttaaagttataagaaaataatattataaaattgtagaattaaagttttataaagttaaaagttcgttgatgttggttattttgttgaataaaatataggaagattagttgaattttgtttttttttaaggtttttttttttgtggggttttttttttttttttttttttgagaaggagttttgttttgttttttaggttggagtgtagtggcgttattttagtttattgtaatttttggttttcgtgtttaagtaattttttgttttagttttttaagtagttgggattataggcgttcgttattattgtttggttaatttttgtatttttagtagagatggggttttattattttggttaggttgattttgaatttttgatttcgtgatttattcgtttcggttatttaaagtgttgggattataggcgtgagttattacgttttgttttttgtaagttttataaggtattttttatttgtgttttaagtttaagtgttttagtatttatttattttta

SEQ ID NO: 143 - DNA, 3001 bp, homo sapiens
aagtttttgttattgtgaatagtgttgtaataaatatatgtgtgtatgtgtttttatagtagtatgatttatagttttttgggtatatatttagtaatgggatggttgggttaaatggtatttttagatttttgaggaattgttatattgatttttataagggttgaattagtttatagttttattaatagtgtaaaagtgtttttatttttttatattttttttagtatttgttgttttttgattttttaatgattattattttaattggtgtgagatggtattttattgtggttttgatttgtatttttttgatggttagtgatggtgagtatttttttatgtgttttttggttgtataaatgtttttttttgagaagtgtttgtttatgttttttgtttattttttgatggggttgttaaattttttttttttaaaaaagtttaaaatattggttgggtgtagtggtttatgtttgtaattttagtattttgggaggttgaggtgggaggattatgaggttaggagtttgagattagtttggttattgtggtgaaattttgtttttattaaaaatataaaagttagttggatgtggtggtgggtgtttgtaattttatttttttggaaggttgatgtaggagaattgtttgaatttgggaggtggaggttgtagtgagttgagattgtgttatggtattttagtttgggtgaaagagtgagattttgttttaagaaaaatatatatatatatatatatatatatatatatatatataaataaaagtttaaaatattaattaggtatatttgtatttaattgttttatgaatttttgtttttaattttttttttataatttattttttttttttttttttttttgagataaggttttgttttgttgtttaggttggatggagtgtagtggtgtgattatagtttattgtggttttaaattttttgtttaagtgattttttagatttttaagtagttgggattataggtgtgtattatgtttttaggttaattaaaaaaattttttttttgtggagatagggttttgttatattgtttaggttggttttaaatttttgggttttagtaattttgttgttttgttttttaaagtgttgggattataggtgtgagtggttgttggggtttttaatttgggtttttgaattgttttaagaagtgtttttgaatttgggaattgtaagtaatgtttttgtgaggatttttatatagtttatttattttttgaagagtatggattgaaaaaggtatagagtatttattgtatgtagagaaaattagtaatttttgttttttatttttagtttgaggtgtttatttttatgtggggttaggaggtggaagtgaaattagaagaaaaaattttgagatttataaggtagtttaggtttttagtgatatgagttaaagagaatttggatgttaggattgtagtagatagagtttggttttggggtttgtattagttgtatggaaggtggaaatagtttttaagttgtaatttgttgtggtttttttttaatagtgtaggtgttaggattgttaggatgttgtgtattttttgtgatgttttgttttggtgtgaggtaagatgggaaagttaagatggatgtgtttatttgaatgttttgtatgtttttttgttattagtatttgagtttgttgttgttgtttgttttttttttagaataggggagggagagggaatgagaagttgttgtggtttaagagttattgtgaaggattttgttgttgtttttgggtttttttggtttttgtgtttttggggagtagttggggtttgttgtgtttgatgtgttttgagttatataggtgtgggtgttgtattgtagtatttggtggtttgttgtgtgttgtgtgatttttgtatttgttttgaggttgagttttttttggtggttgtaggtttggaaatttggggtattgggaatttgagggagggttttgagtgtgttttggggttgagggggtttgtgggtgtttttggtttgtgggttggggtgttttttttggtttttgtttgttaattttttttttgagttgtgtgtagtattttatgtgtagttttagtttttagattggtttttagtttttttgagttgtttttttgagttttgggtttttagtttgtttttattgttttttagaaaggttggggaagtttttgtggagatttaagtttttgttagtgtgtatttgggttttttttttttttttttggtagggtagtgtttgtaggaattattgttgatattgttatttatagtatataaatttaatagtatttttatgtgtagttgtttatgttgtatttaataagtaaaaatatttttaaaagtttggggtattgaaaaagtattaaatatgtggtattaattggtataaaatgataattttttaataattttgtaatttttttttaaagttataagaaaataatattataaaattgtagaattaaagttttataaagttaaaagtttgttgatgttggttattttgttgaataaaatataggaagattagttgaattttgtttttttttaaggtttttttttttgtggggttttttttttttttttttttttgagaaggagttttgttttgttttttaggttggagtgtagtggtgttattttagtttattgtaatttttggtttttgtgtttaagtaattttttgttttagttttttaagtagttgggattataggtgtttgttattattgtttggttaatttttgtatttttagtagagatggggttttattattttggttaggttgattttgaatttttgattttgtgatttatttgttttggttatttaaagtgttgggattataggtgtgagttattatgttttgttttttgtaagttttataaggtattttttatttgtgttttaagtttaagtgttttagtatttatttattttta

SEQ ID NO: 144 - DNA, 3001 bp, homo sapiens
tagaaataaatgagtattgggatatttgaatttggaatataagtaaaaagtgttttataaaatttataaggggtagggcgtggtggtttacgtttgtaattttagtattttgggtggtcgagacgggtggattacgaggttaggagtttaagattagtttggttaagatggtgaaattttatttttattaaaaatataaaaattagttagatagtgatggcgggcgtttgtaattttagttatttgggaggttgaagtagagaattgtttgaatacgggagttagaggttatagtgagttgagatggcgttattgtattttagtttaggagatagaataagatttttttttaaaaaaaaaaaaaaaaagaaaattttataaaaaaaaaaattttaaaagaaaataaaatttagttggtttttttatattttatttaatagaataattaatattaacgaatttttgattttatgaaattttagttttgtaattttataatgttatttttttataattttgagagaaaattatagaattgttaaagaattattattttgtatcgattaatgttatatatttaatatttttttagtattttaaatttttagaaatgtttttatttgttaggtgtaatataaatagttatacgtaaaaatattattaaatttatatgttataaataatagtattagtaatgatttttataaatattattttgttaaaaaaaaaaaaaagagatttaaatgtatattaacgggagtttaagtttttataagagtttttttagtttttttagaggacggtgaaaataggttgagagttcgaggtttagaaaaatagtttagaggggttggaggttagtttgaaagttgaggttgtatatgggatgttacgtatagtttaggaaagaggttggtaagtaggagtcggaaggagtattttagttcgtaggttaggagcgttcgtaggtttttttagtttcggagtacgtttaaggttttttttcgggtttttagtatttcgggtttttagatttacggttattaggggaggttcggtttcgggacgggtgcgagagttacgcggcgcgcgatagattattaagtgttgcggtacggcgttcgtatttgtataattcgggacgcgttaggcgcggcgagtttcggttgtttttcggaggcgtaggggtcgaggaggttcgagggtagcggcggggttttttatagtgatttttgggtcgtagtagttttttatttttttttttttttttattttggaggaagaacgggtaatagtagcgggttcgagtgttaatggtaggaaggcgtgcgagacgtttaaatggacgcgtttattttgattttttcgttttgtttcgcgtcggggcggggtatcgcgggaggtgcgcggcgttttagtagttttggcgtttgcgttgttgagggaagatcgcggcgggttataatttgggggttatttttatttttcgtgcgattgatgcgaatttcgaagtcggattttgtttgttatagttttggcgtttaagttttttttagtttatgttattagggatttgaattgttttatagattttagggtttttttttttggtttcgttttcgttttttgattttacgtggaggtaggtattttaggttgagggtggggagtaggggttgttgattttttttacgtgtagtgaatgttttatgtttttttcggtttatatttttcgaagagtggatgaattgtgtgaaggtttttatagaaacgttgtttgtaatttttagatttagagatattttttaaggcgatttaaagatttaagttaagaattttagcggttattcgcgtttgtaattttagtattttgggaggcgaggcgataggattgttggagtttaagagtttgaaattagtttgggtaatatagcgagattttgtttttataaaagaaaaatttttttaattagtttggaggcgtggtgcgtatttgtagttttagttgtttgggagtttggaggattatttgagtagggagtttgaggttatagtgagttatgatcgcgttattgtattttatttagtttgggtaatagagtaagattttgttttaaaaaaaaaaaaaaaaaaagaatgggttataggagaaaggttagaaataaagatttatgaaatagttaaatataaatatatttaattgatattttaaatttttgtttgtgtgtgtgtgtgtgtgtgtgtgtgtgtgtgtgtgtgttttttttgagatagagtttcgttttttcgtttaggttggagtgtcgtggtataatttcggtttattgtaattttcgtttttcgagtttaagtaatttttttgtattagttttttaagaaggtgggattataggcgttcgttattacgtttagttaatttttgtatttttagtagagatagggttttattacgatggttaggttggtttcgaatttttgatttcgtgattttttcgtttcggttttttaaagtgttaggattataggcgtgagttattgcgttcggttaatattttaaatttttttaaaaaaaaaaagtttagtaattttattaaaaagtgggcgaaggacgtgaatagatattttttaaaagaagatatttatgtagttaaaaaatatatgaaaaaatgtttattattattggttattagagaaatgtaaattaaaattatagtgagatattattttatattagttagaatggtaattattaaaaagttaggaaataataggtgttggagaggatgtggagaaataggaatatttttatattgttggtgggattgtaaattagtttaatttttgtggaagtcggtgtggtaattttttagggatttagaaatattatttgatttagttattttattattgggtatatatttaaaggattataaattatgttgttataaagatatatgtatatatatgtttattgcggtattatttataatagtaaagattt

SEQ ID NO: 145 - DNA, 3001 bp, homo sapiens
tagaaataaatgagtattgggatatttgaatttggaatataagtaaaaagtgttttataaaatttataaggggtagggtgtggtggtttatgtttgtaattttagtattttgggtggttgagatgggtggattatgaggttaggagtttaagattagtttggttaagatggtgaaattttatttttattaaaaatataaaaattagttagatagtgatggtgggtgtttgtaattttagttatttgggaggttgaagtagagaattgtttgaatatgggagttagaggttatagtgagttgagatggtgttattgtattttagtttaggagatagaataagatttttttttaaaaaaaaaaaaaaaaagaaaattttataaaaaaaaaaattttaaaagaaaataaaatttagttggtttttttatattttatttaatagaataattaatattaatgaatttttgattttatgaaattttagttttgtaattttataatgttatttttttataattttgagagaaaattatagaattgttaaagaattattattttgtattgattaatgttatatatttaatatttttttagtattttaaatttttagaaatgtttttatttgttaggtgtaatataaatagttatatgtaaaaatattattaaatttatatgttataaataatagtattagtaatgatttttataaatattattttgttaaaaaaaaaaaaaagagatttaaatgtatattaatgggagtttaagtttttataagagtttttttagtttttttagaggatggtgaaaataggttgagagtttgaggtttagaaaaatagtttagaggggttggaggttagtttgaaagttgaggttgtatatgggatgttatgtatagtttaggaaagaggttggtaagtaggagttggaaggagtattttagtttgtaggttaggagtgtttgtaggtttttttagttttggagtatgtttaaggtttttttttgggtttttagtattttgggtttttagatttatggttattaggggaggtttggttttgggatgggtgtgagagttatgtggtgtgtgatagattattaagtgttgtggtatggtgtttgtatttgtataatttgggatgtgttaggtgtggtgagttttggttgttttttggaggtgtaggggttgaggaggtttgagggtagtggtggggttttttatagtgatttttgggttgtagtagttttttatttttttttttttttttattttggaggaagaatgggtaatagtagtgggtttgagtgttaatggtaggaaggtgtgtgagatgtttaaatggatgtgtttattttgatttttttgttttgttttgtgttggggtggggtattgtgggaggtgtgtggtgttttagtagttttggtgtttgtgttgttgagggaagattgtggtgggttataatttgggggttatttttattttttgtgtgattgatgtgaattttgaagttggattttgtttgttatagttttggtgtttaagttttttttagtttatgttattagggatttgaattgttttatagattttagggtttttttttttggttttgtttttgttttttgattttatgtggaggtaggtattttaggttgagggtggggagtaggggttgttgattttttttatgtgtagtgaatgttttatgttttttttggtttatattttttgaagagtggatgaattgtgtgaaggtttttatagaaatgttgtttgtaatttttagatttagagatattttttaaggtgatttaaagatttaagttaagaattttagtggttatttgtgtttgtaattttagtattttgggaggtgaggtgataggattgttggagtttaagagtttgaaattagtttgggtaatatagtgagattttgtttttataaaagaaaaatttttttaattagtttggaggtgtggtgtgtatttgtagttttagttgtttgggagtttggaggattatttgagtagggagtttgaggttatagtgagttatgattgtgttattgtattttatttagtttgggtaatagagtaagattttgttttaaaaaaaaaaaaaaaaaaagaatgggttataggagaaaggttagaaataaagatttatgaaatagttaaatataaatatatttaattgatattttaaatttttgtttgtgtgtgtgtgtgtgtgtgtgtgtgtgtgtgtgtgtgttttttttgagatagagttttgtttttttgtttaggttggagtgttgtggtataattttggtttattgtaatttttgttttttgagtttaagtaatttttttgtattagttttttaagaaggtgggattataggtgtttgttattatgtttagttaatttttgtatttttagtagagatagggttttattatgatggttaggttggttttgaatttttgattttgtgatttttttgttttggttttttaaagtgttaggattataggtgtgagttattgtgtttggttaatattttaaatttttttaaaaaaaaaaagtttagtaattttattaaaaagtgggtgaaggatgtgaatagatattttttaaaagaagatatttatgtagttaaaaaatatatgaaaaaatgtttattattattggttattagagaaatgtaaattaaaattatagtgagatattattttatattagttagaatggtaattattaaaaagttaggaaataataggtgttggagaggatgtggagaaataggaatatttttatattgttggtgggattgtaaattagtttaatttttgtggaagttggtgtggtaattttttagggatttagaaatattatttgatttagttattttattattgggtatatatttaaaggattataaattatgttgttataaagatatatgtatatatatgtttattgtggtattatttataatagtaaagattt

SEQ ID NO: 146 - DNA, 50 bp, homo sapiens
cgccccctcgaagtccggggactgattatcaaggccttcgccctaactga

SEQ ID NO: 147 - DNA, 50 bp, homo sapiens
cgttttttcgaagttcggggattgattattaaggttttcgttttaattga

SEQ ID NO: 148 - DNA, 50 bp, homo sapiens
tgtttttttgaagtttggggattgattattaaggtttttgttttaattga

SEQ ID NO: 149 - DNA, 50 bp, homo sapiens
ttagttagggcgaaggttttgataattagttttcggatttcgagggggcg

SEQ ID NO: 150 - DNA, 50 bp, homo sapiens
ttagttagggtgaaggttttgataattagtttttggattttgagggggtg

SEQ ID NO: 151 - DNA, 3001 bp, homo sapiens
attacaagcatgagctactgcacctgaccttgacttattttttaaaatcctagctaaatccactgaggttggatttcctatgatcattgtcccttcccctattgtacagatggagaaactgagacacagaacagtttagtgtcctgcctgggtcctgtcataaacaggcagaggcaggttttaaacccaggcaggtcttccagagtccttgctttggccactacacttgaatgctttcttttatttttatttttgagacggagtctctgtcacccaggctggagtgcagtggcaggatctcggctcactgcaacctctgagcccagggttcaagcgactctcctgcctcagcatcctgagtagctgggattacaggcacttgccaccacagctggctaatttttgaatttttagtagagacgggtttcatcatgttggtcagtctggtctcaaactcctgacctcaagagatcagccctacttgacctcccaaagtgctgggataacaggcatgaaccaccaaggagcctcagggggcttgtccctcccagcctacacctgtgtcagactctgattgggggcggaggtgcccaccacctctgcggcttcaggggctggggcctcactaagtggggcgtttagctgccttccctctcctccgctccctgccctgactgtcacagctagatccggattctgtgcctgagaccccctcattaggccgtcagagccgacgccacacgccccctctcccgccccagggactattttgggacgcagagctgtgatcaccaaaccggagtggtgggggccacggcaggccagtgaggatcccagtcctggggagagggcgccttccaggaggccctgagtactggcagcccctgatgtctgctgggactctcagactcttgaggtgggtgggtgggggaccggtggcggcaggaaggtgggtgttaaagtcatcatcacccgtccacccccaggtcgtcctagccgcacagagacagagcagtttcctacaggaagcgccgccgggcggttccatccgctacccattgtctgcgggtccgggggccgtgcgtccctccccaaaacaccatttccgtgacacgctcccacacccagcccagcgcgaggggctggctggggtccccaggccgtcccgggaaagggtcccagggccggttgtggcattagggagcgaacgagccccgcagtgagctcccgaagggcgagaggggggcaagcccacgcctccagagccccccactctgctcgctacccacctgggacttccaatgtgggaggggtcccggccagaggacacgacgcccgccccgtcgcagcgggcagagccctcagtggggctggaaacgcagcgcagcgccgggtcccggtgcgtccccgaatccacccacccaggggtcccccatccgtgtccccgcaagctggcaatttacctgaagccgcagccccagccgcgcccgcacccgagcccgccccctcgaagtccggggactgattatcaaggccttcgccctaactgacggccacgccagccaaccagcacccgaggctctccaagccgcccagtgggacggtggggtgggacaggcaggcggggcctggaatgtaggggtggtgactgagggcgggccctggagtgacggtcgccgagcgctggctggcggcatttctgcaccagcagaggtcaagtctctgcccagcgccgggccaaggagcttggatttgatccacaggcacgagggagccatgggagaactatgagtagaagagtaacccggtgggatttctataactggcacttatttcgcagtgcctgggtgaagtatcaggtcccggatcttccccaccgcagggcctctgcacatgctgttccacctacctgaaatgctttcccttgcacctgtacacgtaggtactttttgaggctcccctactgttttttgttttgttttgtttttgttttttgagacggagtcccaggctggagtgcagtgacactcactgcaacctccgcctcctgggttcaagcaattctcctgcctcagcctcccgagtagctgggattacagacacacaccaccacgtccagctaatatttgtatttttagtagagatggggtttcaccatgttggccgggctggtctggaactcctgacctcaagtgatccgcccgcctcagcctcccaaagtgttgggattacaggcgtgagccaccgcgcccggccttccctactttctgaggttcagcttttgtgttgctgccccctaaattcctgacatagcccctccccagttagtatttttctcatcactctattgtattaacctaatagctacttttactatctggaaaaaaaaaaaaaagcagactctgttattggcaggcgcagtgactcacgcctgtaaatccagtatttagggaggcatagatgggaggatagcttgagccaggagttgagaccagcctgggcaacatagcaagacctagttctcaaaacaaaagaaaacaacaaaacaaaaagacaaaaacgaaacactcagttatttatttggtttattttttaatttaatttaatttttttttagacagagtctcgctctgtcccaggctggagtgcagtggtgcgatcttggctcactgcaacctctgcctcctggggttcaagcgattctcctgcctcagccttctaagtagctgggattacaggcgcacaccaccacgcccagctaatttttgtatttttagtagagacagggtttcaccatgttgcccaggctggtctcgaactcctgacctcaggtgatccgcccacctcagcctcccaaagtgctgggattacaggcgtgagccaccatgcctggctggttatttattggtttacctgcttgccatctcactaaagtgtcggcaccaaggccaggtggggtggctcatgcctgtaatcctagcacctcctgaggctgaggtgg

SEQ ID NO: 152 - DNA, 3001 bp, homo sapiens
attataagtatgagttattgtatttgattttgatttattttttaaaattttagttaaatttattgaggttggattttttatgattattgtttttttttttattgtatagatggagaaattgagatatagaatagtttagtgttttgtttgggttttgttataaataggtagaggtaggttttaaatttaggtaggttttttagagtttttgttttggttattatatttgaatgtttttttttatttttatttttgagacggagtttttgttatttaggttggagtgtagtggtaggatttcggtttattgtaatttttgagtttagggtttaagcgatttttttgttttagtattttgagtagttgggattataggtatttgttattatagttggttaatttttgaatttttagtagagacgggttttattatgttggttagtttggttttaaatttttgattttaagagattagttttatttgattttttaaagtgttgggataataggtatgaattattaaggagttttagggggtttgttttttttagtttatatttgtgttagattttgattgggggcggaggtgtttattatttttgcggttttaggggttggggttttattaagtggggcgtttagttgttttttttttttttcgttttttgttttgattgttatagttagattcggattttgtgtttgagatttttttattaggtcgttagagtcgacgttatacgttttttttttcgttttagggattattttgggacgtagagttgtgattattaaatcggagtggtgggggttacggtaggttagtgaggattttagttttggggagagggcgttttttaggaggttttgagtattggtagtttttgatgtttgttgggatttttagatttttgaggtgggtgggtgggggatcggtggcggtaggaaggtgggtgttaaagttattattattcgtttatttttaggtcgttttagtcgtatagagatagagtagttttttataggaagcgtcgtcgggcggttttattcgttatttattgtttgcgggttcgggggtcgtgcgtttttttttaaaatattattttcgtgatacgtttttatatttagtttagcgcgaggggttggttggggtttttaggtcgtttcgggaaagggttttagggtcggttgtggtattagggagcgaacgagtttcgtagtgagttttcgaagggcgagaggggggtaagtttacgtttttagagttttttattttgttcgttatttatttgggatttttaatgtgggaggggtttcggttagaggatacgacgttcgtttcgtcgtagcgggtagagtttttagtggggttggaaacgtagcgtagcgtcgggtttcggtgcgttttcgaatttatttatttaggggttttttattcgtgttttcgtaagttggtaatttatttgaagtcgtagttttagtcgcgttcgtattcgagttcgttttttcgaagttcggggattgattattaaggttttcgttttaattgacggttacgttagttaattagtattcgaggttttttaagtcgtttagtgggacggtggggtgggataggtaggcggggtttggaatgtaggggtggtgattgagggcgggttttggagtgacggtcgtcgagcgttggttggcggtatttttgtattagtagaggttaagtttttgtttagcgtcgggttaaggagtttggatttgatttataggtacgagggagttatgggagaattatgagtagaagagtaattcggtgggatttttataattggtatttatttcgtagtgtttgggtgaagtattaggtttcggattttttttatcgtagggtttttgtatatgttgttttatttatttgaaatgtttttttttgtatttgtatacgtaggtattttttgaggtttttttattgttttttgttttgttttgtttttgttttttgagacggagttttaggttggagtgtagtgatatttattgtaattttcgttttttgggtttaagtaatttttttgttttagtttttcgagtagttgggattatagatatatattattacgtttagttaatatttgtatttttagtagagatggggttttattatgttggtcgggttggtttggaatttttgattttaagtgattcgttcgttttagttttttaaagtgttgggattataggcgtgagttatcgcgttcggttttttttattttttgaggtttagtttttgtgttgttgttttttaaatttttgatatagtttttttttagttagtattttttttattattttattgtattaatttaatagttatttttattatttggaaaaaaaaaaaaaagtagattttgttattggtaggcgtagtgatttacgtttgtaaatttagtatttagggaggtatagatgggaggatagtttgagttaggagttgagattagtttgggtaatatagtaagatttagtttttaaaataaaagaaaataataaaataaaaagataaaaacgaaatatttagttatttatttggtttattttttaatttaatttaatttttttttagatagagtttcgttttgttttaggttggagtgtagtggtgcgattttggtttattgtaatttttgttttttggggtttaagcgatttttttgttttagttttttaagtagttgggattataggcgtatattattacgtttagttaatttttgtatttttagtagagatagggttttattatgttgtttaggttggtttcgaatttttgattttaggtgattcgtttattttagttttttaaagtgttgggattataggcgtgagttattatgtttggttggttatttattggtttatttgtttgttattttattaaagtgtcggtattaaggttaggtggggtggtttatgtttgtaattttagtattttttgaggttgaggtgg

SEQ ID NO: 153 - DNA, 3001 bp, homo sapiens
attataagtatgagttattgtatttgattttgatttattttttaaaattttagttaaatttattgaggttggattttttatgattattgtttttttttttattgtatagatggagaaattgagatatagaatagtttagtgttttgtttgggttttgttataaataggtagaggtaggttttaaatttaggtaggttttttagagtttttgttttggttattatatttgaatgtttttttttatttttatttttgagatggagtttttgttatttaggttggagtgtagtggtaggattttggtttattgtaatttttgagtttagggtttaagtgatttttttgttttagtattttgagtagttgggattataggtatttgttattatagttggttaatttttgaatttttagtagagatgggttttattatgttggttagtttggttttaaatttttgattttaagagattagttttatttgattttttaaagtgttgggataataggtatgaattattaaggagttttagggggtttgttttttttagtttatatttgtgttagattttgattgggggtggaggtgtttattatttttgtggttttaggggttggggttttattaagtggggtgtttagttgtttttttttttttttgttttttgttttgattgttatagttagatttggattttgtgtttgagatttttttattaggttgttagagttgatgttatatgtttttttttttgttttagggattattttgggatgtagagttgtgattattaaattggagtggtgggggttatggtaggttagtgaggattttagttttggggagagggtgttttttaggaggttttgagtattggtagtttttgatgtttgttgggatttttagatttttgaggtgggtgggtgggggattggtggtggtaggaaggtgggtgttaaagttattattatttgtttatttttaggttgttttagttgtatagagatagagtagttttttataggaagtgttgttgggtggttttatttgttatttattgtttgtgggtttgggggttgtgtgtttttttttaaaatattatttttgtgatatgtttttatatttagtttagtgtgaggggttggttggggtttttaggttgttttgggaaagggttttagggttggttgtggtattagggagtgaatgagttttgtagtgagtttttgaagggtgagaggggggtaagtttatgtttttagagttttttattttgtttgttatttatttgggatttttaatgtgggaggggttttggttagaggatatgatgtttgttttgttgtagtgggtagagtttttagtggggttggaaatgtagtgtagtgttgggttttggtgtgtttttgaatttatttatttaggggttttttatttgtgtttttgtaagttggtaatttatttgaagttgtagttttagttgtgtttgtatttgagtttgtttttttgaagtttggggattgattattaaggtttttgttttaattgatggttatgttagttaattagtatttgaggttttttaagttgtttagtgggatggtggggtgggataggtaggtggggtttggaatgtaggggtggtgattgagggtgggttttggagtgatggttgttgagtgttggttggtggtatttttgtattagtagaggttaagtttttgtttagtgttgggttaaggagtttggatttgatttataggtatgagggagttatgggagaattatgagtagaagagtaatttggtgggatttttataattggtatttattttgtagtgtttgggtgaagtattaggttttggattttttttattgtagggtttttgtatatgttgttttatttatttgaaatgtttttttttgtatttgtatatgtaggtattttttgaggtttttttattgttttttgttttgttttgtttttgttttttgagatggagttttaggttggagtgtagtgatatttattgtaatttttgttttttgggtttaagtaatttttttgttttagttttttgagtagttgggattatagatatatattattatgtttagttaatatttgtatttttagtagagatggggttttattatgttggttgggttggtttggaatttttgattttaagtgatttgtttgttttagttttttaaagtgttgggattataggtgtgagttattgtgtttggttttttttattttttgaggtttagtttttgtgttgttgttttttaaatttttgatatagtttttttttagttagtattttttttattattttattgtattaatttaatagttatttttattatttggaaaaaaaaaaaaaagtagattttgttattggtaggtgtagtgatttatgtttgtaaatttagtatttagggaggtatagatgggaggatagtttgagttaggagttgagattagtttgggtaatatagtaagatttagtttttaaaataaaagaaaataataaaataaaaagataaaaatgaaatatttagttatttatttggtttattttttaatttaatttaatttttttttagatagagttttgttttgttttaggttggagtgtagtggtgtgattttggtttattgtaatttttgttttttggggtttaagtgatttttttgttttagttttttaagtagttgggattataggtgtatattattatgtttagttaatttttgtatttttagtagagatagggttttattatgttgtttaggttggttttgaatttttgattttaggtgatttgtttattttagttttttaaagtgttgggattataggtgtgagttattatgtttggttggttatttattggtttatttgtttgttattttattaaagtgttggtattaaggttaggtggggtggtttatgtttgtaattttagtattttttgaggttgaggtgg

SEQ ID NO: 154 - DNA, 3001 bp, homo sapiens
ttattttagttttaggaggtgttaggattataggtatgagttattttatttggttttggtgtcgatattttagtgagatggtaagtaggtaaattaataaataattagttaggtatggtggtttacgtttgtaattttagtattttgggaggttgaggtgggcggattatttgaggttaggagttcgagattagtttgggtaatatggtgaaattttgtttttattaaaaatataaaaattagttgggcgtggtggtgtgcgtttgtaattttagttatttagaaggttgaggtaggagaatcgtttgaattttaggaggtagaggttgtagtgagttaagatcgtattattgtattttagtttgggatagagcgagattttgtttaaaaaaaaattaaattaaattaaaaaataaattaaataaataattgagtgtttcgtttttgtttttttgttttgttgtttttttttgttttgagaattaggttttgttatgttgtttaggttggttttaatttttggtttaagttatttttttatttatgtttttttaaatattggatttataggcgtgagttattgcgtttgttaataatagagtttgtttttttttttttttttagatagtaaaagtagttattaggttaatataatagagtgatgagaaaaatattaattggggaggggttatgttaggaatttagggggtagtaatataaaagttgaattttagaaagtagggaaggtcgggcgcggtggtttacgtttgtaattttaatattttgggaggttgaggcgggcggattatttgaggttaggagttttagattagttcggttaatatggtgaaattttatttttattaaaaatataaatattagttggacgtggtggtgtgtgtttgtaattttagttattcgggaggttgaggtaggagaattgtttgaatttaggaggcggaggttgtagtgagtgttattgtattttagtttgggatttcgttttaaaaaataaaaataaaataaaataaaaaatagtaggggagttttaaaaagtatttacgtgtataggtgtaagggaaagtattttaggtaggtggaatagtatgtgtagaggttttgcggtggggaagattcgggatttgatattttatttaggtattgcgaaataagtgttagttatagaaattttatcgggttatttttttatttatagtttttttatggttttttcgtgtttgtggattaaatttaagttttttggttcggcgttgggtagagatttgatttttgttggtgtagaaatgtcgttagttagcgttcggcgatcgttattttagggttcgtttttagttattatttttatattttaggtttcgtttgtttgttttattttatcgttttattgggcggtttggagagtttcgggtgttggttggttggcgtggtcgttagttagggcgaaggttttgataattagttttcggatttcgagggggcgggttcgggtgcgggcgcggttggggttgcggttttaggtaaattgttagtttgcggggatacggatgggggatttttgggtgggtggattcggggacgtatcgggattcggcgttgcgttgcgtttttagttttattgagggttttgttcgttgcgacggggcgggcgtcgtgttttttggtcgggattttttttatattggaagttttaggtgggtagcgagtagagtggggggttttggaggcgtgggtttgtttttttttcgtttttcgggagtttattgcggggttcgttcgttttttaatgttataatcggttttgggattttttttcgggacggtttggggattttagttagtttttcgcgttgggttgggtgtgggagcgtgttacggaaatggtgttttggggagggacgtacggttttcggattcgtagataatgggtagcggatggaatcgttcggcggcgttttttgtaggaaattgttttgtttttgtgcggttaggacgatttgggggtggacgggtgatgatgattttaatatttatttttttgtcgttatcggttttttatttatttattttaagagtttgagagttttagtagatattaggggttgttagtatttagggttttttggaaggcgttttttttttaggattgggatttttattggtttgtcgtggtttttattatttcggtttggtgattatagttttgcgttttaaaatagtttttggggcgggagagggggcgtgtggcgtcggttttgacggtttaatgagggggttttaggtatagaattcggatttagttgtgatagttagggtagggagcggaggagagggaaggtagttaaacgttttatttagtgaggttttagtttttgaagtcgtagaggtggtgggtattttcgtttttaattagagtttgatataggtgtaggttgggagggataagttttttgaggttttttggtggtttatgtttgttattttagtattttgggaggttaagtagggttgattttttgaggttaggagtttgagattagattgattaatatgatgaaattcgtttttattaaaaatttaaaaattagttagttgtggtggtaagtgtttgtaattttagttatttaggatgttgaggtaggagagtcgtttgaattttgggtttagaggttgtagtgagtcgagattttgttattgtattttagtttgggtgatagagatttcgttttaaaaataaaaataaaagaaagtatttaagtgtagtggttaaagtaaggattttggaagatttgtttgggtttaaaatttgtttttgtttgtttatgataggatttaggtaggatattaaattgttttgtgttttagtttttttatttgtataataggggaagggataatgattataggaaatttaattttagtggatttagttaggattttaaaaaataagttaaggttaggtgtagtagtttatgtttgtaat

SEQ ID NO: 155 - DNA, 3001 bp, homo sapiens
ttattttagttttaggaggtgttaggattataggtatgagttattttatttggttttggtgttgatattttagtgagatggtaagtaggtaaattaataaataattagttaggtatggtggtttatgtttgtaattttagtattttgggaggttgaggtgggtggattatttgaggttaggagtttgagattagtttgggtaatatggtgaaattttgtttttattaaaaatataaaaattagttgggtgtggtggtgtgtgtttgtaattttagttatttagaaggttgaggtaggagaattgtttgaattttaggaggtagaggttgtagtgagttaagattgtattattgtattttagtttgggatagagtgagattttgtttaaaaaaaaattaaattaaattaaaaaataaattaaataaataattgagtgttttgtttttgtttttttgttttgttgtttttttttgttttgagaattaggttttgttatgttgtttaggttggttttaatttttggtttaagttatttttttatttatgtttttttaaatattggatttataggtgtgagttattgtgtttgttaataatagagtttgtttttttttttttttttagatagtaaaagtagttattaggttaatataatagagtgatgagaaaaatattaattggggaggggttatgttaggaatttagggggtagtaatataaaagttgaattttagaaagtagggaaggttgggtgtggtggtttatgtttgtaattttaatattttgggaggttgaggtgggtggattatttgaggttaggagttttagattagtttggttaatatggtgaaattttatttttattaaaaatataaatattagttggatgtggtggtgtgtgtttgtaattttagttatttgggaggttgaggtaggagaattgtttgaatttaggaggtggaggttgtagtgagtgttattgtattttagtttgggattttgttttaaaaaataaaaataaaataaaataaaaaatagtaggggagttttaaaaagtatttatgtgtataggtgtaagggaaagtattttaggtaggtggaatagtatgtgtagaggttttgtggtggggaagatttgggatttgatattttatttaggtattgtgaaataagtgttagttatagaaattttattgggttatttttttatttatagtttttttatggtttttttgtgtttgtggattaaatttaagttttttggtttggtgttgggtagagatttgatttttgttggtgtagaaatgttgttagttagtgtttggtgattgttattttagggtttgtttttagttattatttttatattttaggttttgtttgtttgttttattttattgttttattgggtggtttggagagttttgggtgttggttggttggtgtggttgttagttagggtgaaggttttgataattagtttttggattttgagggggtgggtttgggtgtgggtgtggttggggttgtggttttaggtaaattgttagtttgtggggatatggatgggggatttttgggtgggtggatttggggatgtattgggatttggtgttgtgttgtgtttttagttttattgagggttttgtttgttgtgatggggtgggtgttgtgttttttggttgggattttttttatattggaagttttaggtgggtagtgagtagagtggggggttttggaggtgtgggtttgttttttttttgttttttgggagtttattgtggggtttgtttgttttttaatgttataattggttttgggatttttttttgggatggtttggggattttagttagttttttgtgttgggttgggtgtgggagtgtgttatggaaatggtgttttggggagggatgtatggtttttggatttgtagataatgggtagtggatggaattgtttggtggtgttttttgtaggaaattgttttgtttttgtgtggttaggatgatttgggggtggatgggtgatgatgattttaatatttatttttttgttgttattggttttttatttatttattttaagagtttgagagttttagtagatattaggggttgttagtatttagggttttttggaaggtgttttttttttaggattgggatttttattggtttgttgtggtttttattattttggtttggtgattatagttttgtgttttaaaatagtttttggggtgggagagggggtgtgtggtgttggttttgatggtttaatgagggggttttaggtatagaatttggatttagttgtgatagttagggtagggagtggaggagagggaaggtagttaaatgttttatttagtgaggttttagtttttgaagttgtagaggtggtgggtatttttgtttttaattagagtttgatataggtgtaggttgggagggataagttttttgaggttttttggtggtttatgtttgttattttagtattttgggaggttaagtagggttgattttttgaggttaggagtttgagattagattgattaatatgatgaaatttgtttttattaaaaatttaaaaattagttagttgtggtggtaagtgtttgtaattttagttatttaggatgttgaggtaggagagttgtttgaattttgggtttagaggttgtagtgagttgagattttgttattgtattttagtttgggtgatagagattttgttttaaaaataaaaataaaagaaagtatttaagtgtagtggttaaagtaaggattttggaagatttgtttgggtttaaaatttgtttttgtttgtttatgataggatttaggtaggatattaaattgttttgtgttttagtttttttatttgtataataggggaagggataatgattataggaaatttaattttagtggatttagttaggattttaaaaaataagttaaggttaggtgtagtagtttatgtttgtaat

SEQ ID NO: 156 - DNA, 3308 bp, homo sapiens
aaataaaataataaaattaaaataaaataaaataaactcaaggaggagtggtgccctgtgctggacagccattctctgctttcctctccagagtctttgagcctaggtcagcccctgccctctccccccacccatttcctggtgtcccacccaccctcccttggctctgacccgtatccaggagcaggcttgcgatggccaggttcccgtgggacacactgtagtgcagggccgtgttcccgttgccatccgccaggttcaccacgtgcgccagcagttcgggtcccaggcgcctcaccccttccagcatcctggccacgggctccgcctgagagcgccgctggctggacactcgaaaccactcctgggccacgaggcgcactgcgccctgcaagggacaggggccaagataacatcggcgatggtccacggcggcgccgtggtgggggagctggggaggggcgggactgggaagagacccatttggcgtttccaggcaagtaaggaaggtcactcctcgtccaggtggggagccatgcgaacccagatggagggctggggccacacccctatcggagggcaaacacgggggaagggggtcctttccttccagggaagaatttgcgggagaacatggaacggggaaaggcaatgaacgcttgcccttggggagtccgggagtggggctggggccgggcctttttggggaaaccaaggaaagatcggcgctgtcctgggaaggagatcccttcggagagcctggggtcaggcgaggtgcctggcgggaagggatggaacccggtgtgctcccctaagtgggcgtcagaggtccttggaggctcccacgccactccctggtgctgcgctcccggggcactcacgccgtcgctggctactccgcggggccggctcagctgccgctgcagcgctacgcacgcctccctcagacgcgggctcagctcgcacctgcagaggaggccaggagagactcaggatggatcggggacagcgccgaccaggaggagggcagccgcctcctctccaaacaactagcgagcgccgctcacctcccctgtgccacctgctgaggctctgcctccgcctcgggctcagggtcccggatgtccccgccgctgggagggccaggggtgcccgagtcggatcccccgccgctgtcatccccggagcccgaggagctacccgggggctcggcgccaccgttctcgctgtcgccatcgctgtcgctggcgtcctcgctggaggagctctcgtacctgggggcagggtgggaggtgtctgctaaacctcccctgtgggctcgttctggagtcctgcgatgtgggtgtggccgttcccatttaacgatgaggaaactgaggattgcccagaccacgctgccagtagaggggcagagctggggttccaaccccagtctatgtcccggcagaagctgccacaggaggggaaaggcgctcactctccgttgaggaccccaacaaactgcaggctcttgggtccggagctgggttgggcaccaggtgtgccgtctctcttcttcatgatggatttgaggatgcctggcggggatgagatgagggcactgagttcgagtccggcgccgagtaagccagggcccagcgacggggtcgggactcacccgcgggcgccacggccctgtctccgtccatggatccgggcgagctctcctgagtcaaggagggcgcctctgccggggactcggtctgcgcggccttttcggcacagctccacggggtctgggtggtggcctcgcgtagctgggcccgggcccccgccgctgcctcctccgcagcctcgcgggcttcctccagctcccgcaaccggccccgcagaagctcactcaccccgcgctggtgctccagactggcgcgcagcagctctagctcgcgctcggcggccgcaggcagccccagcagcgcctcggtcacccacgcgtccgcctccacggtctcgggggcagcctccacgccggcctcccgggtctccggcacggcctgggcacccgcttctcgggtctcgggcacggcctcggcggccacctcccgggtctggggcgtcccatcgagactcccgacctccccgtcgaggacctggagcgcgccctcgctgcgccctgcagccaggccgtctgggctgtcagcccgggggctggccctggcacggccgccgcgctcggaggtggccaggcgctcggtgagccgccgcagctgggcgagcttgtccgggcgcgtctcagcctccccgtccggctcgggctgcgcgcgcccggccagcagccgcgccttctcggcgcgcagcgcgcgcacctgctcctgcagctcgggcagcgttcgcgcctggtcctcgagctcgcgcaggcgccgcagcgccgcggccatctgctcgcgcaccagctgcagttgggcagggccgggcgaagcaggggcaaggttaggggcggggctgctgcggccggacccgcgtgggctgcgcgggaccccgcggccggggctgggcgcgcgctcgtgtgtctgcgccagctccagccgccggctggtctcccggagcgtgtgctcgacgcgcgggttgcgcacgggcgcgcgcggcgacagcggctgcatcaggagccccgagggcgcgccctgggagagtatgcccggtgctccaccgtcgtcactggccagggactcgctggatgtccaggcgcctgggctacgtgcgcccgcgaggccgggccggggcgcgcggggacggcgcgaggtcgggggtcccggggcgcggcgggcagcggggccacgctccagctcctctatgtacttgaggaagtccaggtccaggtggaagccgtagggcgtctccaccgagtagggcgagctcgggctgcgtgcgcccccggcggcggggaccgggcacaggcgggggccgcccaggtctggaggcacgacgggggcacggggagggcgcatcagaacggggaaacccgggagatactaaacaaaccgagcgtgtcccccacccatgcccacgcttcacacctatctgtacccaagtattaactcaatcgcttgtttaatgagcacctactctgtgctaagcaagtttctaggcccgggggacacagcagtgagcaagacaaacatccctgtcctcctgtagaaagcagataagcatccttccaaacgatgcctacggcaatggtaataataacagggaataaacggaggaggcccgatttagcgtttggttgccagggaagctttcctgtgaggggactttcctgtggagtggag

SEQ ID NO: 157 - DNA, 3308 bp, homo sapiens
aaataaaataataaaattaaaataaaataaaataaatttaaggaggagtggtgttttgtgttggatagttattttttgtttttttttttagagtttttgagtttaggttagtttttgttttttttttttatttattttttggtgttttatttatttttttttggttttgattcgtatttaggagtaggtttgcgatggttaggttttcgtgggatatattgtagtgtagggtcgtgttttcgttgttattcgttaggtttattacgtgcgttagtagttcgggttttaggcgttttattttttttagtattttggttacgggtttcgtttgagagcgtcgttggttggatattcgaaattatttttgggttacgaggcgtattgcgttttgtaagggataggggttaagataatatcggcgatggtttacggcggcgtcgtggtgggggagttggggaggggcgggattgggaagagatttatttggcgtttttaggtaagtaaggaaggttatttttcgtttaggtggggagttatgcgaatttagatggagggttggggttatatttttatcggagggtaaatacgggggaagggggttttttttttttagggaagaatttgcgggagaatatggaacggggaaaggtaatgaacgtttgtttttggggagttcgggagtggggttggggtcgggtttttttggggaaattaaggaaagatcggcgttgttttgggaaggagattttttcggagagtttggggttaggcgaggtgtttggcgggaagggatggaattcggtgtgtttttttaagtgggcgttagaggtttttggaggtttttacgttattttttggtgttgcgttttcggggtatttacgtcgtcgttggttatttcgcggggtcggtttagttgtcgttgtagcgttacgtacgttttttttagacgcgggtttagttcgtatttgtagaggaggttaggagagatttaggatggatcggggatagcgtcgattaggaggagggtagtcgttttttttttaaataattagcgagcgtcgtttattttttttgtgttatttgttgaggttttgttttcgtttcgggtttagggtttcggatgttttcgtcgttgggagggttaggggtgttcgagtcggatttttcgtcgttgttattttcggagttcgaggagttattcgggggttcggcgttatcgttttcgttgtcgttatcgttgtcgttggcgttttcgttggaggagttttcgtatttgggggtagggtgggaggtgtttgttaaattttttttgtgggttcgttttggagttttgcgatgtgggtgtggtcgtttttatttaacgatgaggaaattgaggattgtttagattacgttgttagtagaggggtagagttggggttttaattttagtttatgtttcggtagaagttgttataggaggggaaaggcgtttatttttcgttgaggattttaataaattgtaggtttttgggttcggagttgggttgggtattaggtgtgtcgttttttttttttatgatggatttgaggatgtttggcggggatgagatgagggtattgagttcgagttcggcgtcgagtaagttagggtttagcgacggggtcgggatttattcgcgggcgttacggttttgttttcgtttatggattcgggcgagtttttttgagttaaggagggcgtttttgtcggggattcggtttgcgcggttttttcggtatagttttacggggtttgggtggtggtttcgcgtagttgggttcgggttttcgtcgttgtttttttcgtagtttcgcgggttttttttagttttcgtaatcggtttcgtagaagtttatttatttcgcgttggtgttttagattggcgcgtagtagttttagttcgcgttcggcggtcgtaggtagttttagtagcgtttcggttatttacgcgttcgtttttacggtttcgggggtagtttttacgtcggtttttcgggttttcggtacggtttgggtattcgtttttcgggtttcgggtacggtttcggcggttatttttcgggtttggggcgttttatcgagattttcgattttttcgtcgaggatttggagcgcgttttcgttgcgttttgtagttaggtcgtttgggttgttagttcgggggttggttttggtacggtcgtcgcgttcggaggtggttaggcgttcggtgagtcgtcgtagttgggcgagtttgttcgggcgcgttttagttttttcgttcggttcgggttgcgcgcgttcggttagtagtcgcgttttttcggcgcgtagcgcgcgtatttgtttttgtagttcgggtagcgttcgcgtttggttttcgagttcgcgtaggcgtcgtagcgtcgcggttatttgttcgcgtattagttgtagttgggtagggtcgggcgaagtaggggtaaggttaggggcggggttgttgcggtcggattcgcgtgggttgcgcgggatttcgcggtcggggttgggcgcgcgttcgtgtgtttgcgttagttttagtcgtcggttggtttttcggagcgtgtgttcgacgcgcgggttgcgtacgggcgcgcgcggcgatagcggttgtattaggagtttcgagggcgcgttttgggagagtatgttcggtgttttatcgtcgttattggttagggattcgttggatgtttaggcgtttgggttacgtgcgttcgcgaggtcgggtcggggcgcgcggggacggcgcgaggtcgggggtttcggggcgcggcgggtagcggggttacgttttagtttttttatgtatttgaggaagtttaggtttaggtggaagtcgtagggcgtttttatcgagtagggcgagttcgggttgcgtgcgttttcggcggcggggatcgggtataggcgggggtcgtttaggtttggaggtacgacgggggtacggggagggcgtattagaacggggaaattcgggagatattaaataaatcgagcgtgttttttatttatgtttacgttttatatttatttgtatttaagtattaatttaatcgtttgtttaatgagtatttattttgtgttaagtaagtttttaggttcgggggatatagtagtgagtaagataaatatttttgtttttttgtagaaagtagataagtatttttttaaacgatgtttacggtaatggtaataataatagggaataaacggaggaggttcgatttagcgtttggttgttagggaagtttttttgtgaggggatttttttgtggagtggag

SEQ ID NO: 158 - DNA, 3308 bp, homo sapiens
aaataaaataataaaattaaaataaaataaaataaatttaaggaggagtggtgttttgtgttggatagttattttttgtttttttttttagagtttttgagtttaggttagtttttgttttttttttttatttattttttggtgttttatttatttttttttggttttgatttgtatttaggagtaggtttgtgatggttaggtttttgtgggatatattgtagtgtagggttgtgtttttgttgttatttgttaggtttattatgtgtgttagtagtttgggttttaggtgttttattttttttagtattttggttatgggttttgtttgagagtgttgttggttggatatttgaaattatttttgggttatgaggtgtattgtgttttgtaagggataggggttaagataatattggtgatggtttatggtggtgttgtggtgggggagttggggaggggtgggattgggaagagatttatttggtgtttttaggtaagtaaggaaggttattttttgtttaggtggggagttatgtgaatttagatggagggttggggttatatttttattggagggtaaatatgggggaagggggttttttttttttagggaagaatttgtgggagaatatggaatggggaaaggtaatgaatgtttgtttttggggagtttgggagtggggttggggttgggtttttttggggaaattaaggaaagattggtgttgttttgggaaggagatttttttggagagtttggggttaggtgaggtgtttggtgggaagggatggaatttggtgtgtttttttaagtgggtgttagaggtttttggaggtttttatgttattttttggtgttgtgtttttggggtatttatgttgttgttggttattttgtggggttggtttagttgttgttgtagtgttatgtatgttttttttagatgtgggtttagtttgtatttgtagaggaggttaggagagatttaggatggattggggatagtgttgattaggaggagggtagttgttttttttttaaataattagtgagtgttgtttattttttttgtgttatttgttgaggttttgtttttgttttgggtttagggttttggatgtttttgttgttgggagggttaggggtgtttgagttggattttttgttgttgttatttttggagtttgaggagttatttgggggtttggtgttattgtttttgttgttgttattgttgttgttggtgtttttgttggaggagtttttgtatttgggggtagggtgggaggtgtttgttaaattttttttgtgggtttgttttggagttttgtgatgtgggtgtggttgtttttatttaatgatgaggaaattgaggattgtttagattatgttgttagtagaggggtagagttggggttttaattttagtttatgttttggtagaagttgttataggaggggaaaggtgtttattttttgttgaggattttaataaattgtaggtttttgggtttggagttgggttgggtattaggtgtgttgttttttttttttatgatggatttgaggatgtttggtggggatgagatgagggtattgagtttgagtttggtgttgagtaagttagggtttagtgatggggttgggatttatttgtgggtgttatggttttgtttttgtttatggatttgggtgagtttttttgagttaaggagggtgtttttgttggggatttggtttgtgtggtttttttggtatagttttatggggtttgggtggtggttttgtgtagttgggtttgggtttttgttgttgttttttttgtagttttgtgggttttttttagtttttgtaattggttttgtagaagtttatttattttgtgttggtgttttagattggtgtgtagtagttttagtttgtgtttggtggttgtaggtagttttagtagtgttttggttatttatgtgtttgtttttatggttttgggggtagtttttatgttggttttttgggtttttggtatggtttgggtatttgttttttgggttttgggtatggttttggtggttattttttgggtttggggtgttttattgagatttttgatttttttgttgaggatttggagtgtgtttttgttgtgttttgtagttaggttgtttgggttgttagtttgggggttggttttggtatggttgttgtgtttggaggtggttaggtgtttggtgagttgttgtagttgggtgagtttgtttgggtgtgttttagtttttttgtttggtttgggttgtgtgtgtttggttagtagttgtgtttttttggtgtgtagtgtgtgtatttgtttttgtagtttgggtagtgtttgtgtttggtttttgagtttgtgtaggtgttgtagtgttgtggttatttgtttgtgtattagttgtagttgggtagggttgggtgaagtaggggtaaggttaggggtggggttgttgtggttggatttgtgtgggttgtgtgggattttgtggttggggttgggtgtgtgtttgtgtgtttgtgttagttttagttgttggttggttttttggagtgtgtgtttgatgtgtgggttgtgtatgggtgtgtgtggtgatagtggttgtattaggagttttgagggtgtgttttgggagagtatgtttggtgttttattgttgttattggttagggatttgttggatgtttaggtgtttgggttatgtgtgtttgtgaggttgggttggggtgtgtggggatggtgtgaggttgggggttttggggtgtggtgggtagtggggttatgttttagtttttttatgtatttgaggaagtttaggtttaggtggaagttgtagggtgtttttattgagtagggtgagtttgggttgtgtgtgtttttggtggtggggattgggtataggtgggggttgtttaggtttggaggtatgatgggggtatggggagggtgtattagaatggggaaatttgggagatattaaataaattgagtgtgttttttatttatgtttatgttttatatttatttgtatttaagtattaatttaattgtttgtttaatgagtatttattttgtgttaagtaagtttttaggtttgggggatatagtagtgagtaagataaatatttttgtttttttgtagaaagtagataagtatttttttaaatgatgtttatggtaatggtaataataatagggaataaatggaggaggtttgatttagtgtttggttgttagggaagtttttttgtgaggggatttttttgtggagtggag

SEQ ID NO: 159 - DNA, 3308 bp, homo sapiens
ttttattttataggaaagtttttttataggaaagtttttttggtaattaaacgttaaatcgggtttttttcgtttattttttgttattattattattgtcgtaggtatcgtttggaaggatgtttatttgttttttataggaggatagggatgtttgttttgtttattgttgtgtttttcgggtttagaaatttgtttagtatagagtaggtgtttattaaataagcgattgagttaatatttgggtatagataggtgtgaagcgtgggtatgggtgggggatacgttcggtttgtttagtatttttcgggttttttcgttttgatgcgtttttttcgtgttttcgtcgtgtttttagatttgggcggttttcgtttgtgttcggttttcgtcgtcgggggcgtacgtagttcgagttcgttttattcggtggagacgttttacggtttttatttggatttggatttttttaagtatatagaggagttggagcgtggtttcgttgttcgtcgcgtttcgggattttcgatttcgcgtcgttttcgcgcgtttcggttcggtttcgcgggcgtacgtagtttaggcgtttggatatttagcgagtttttggttagtgacgacggtggagtatcgggtatatttttttagggcgcgttttcggggtttttgatgtagtcgttgtcgtcgcgcgcgttcgtgcgtaattcgcgcgtcgagtatacgtttcgggagattagtcggcggttggagttggcgtagatatacgagcgcgcgtttagtttcggtcgcggggtttcgcgtagtttacgcgggttcggtcgtagtagtttcgtttttaattttgtttttgtttcgttcggttttgtttaattgtagttggtgcgcgagtagatggtcgcggcgttgcggcgtttgcgcgagttcgaggattaggcgcgaacgttgttcgagttgtaggagtaggtgcgcgcgttgcgcgtcgagaaggcgcggttgttggtcgggcgcgcgtagttcgagtcggacggggaggttgagacgcgttcggataagttcgtttagttgcggcggtttatcgagcgtttggttattttcgagcgcggcggtcgtgttagggttagttttcgggttgatagtttagacggtttggttgtagggcgtagcgagggcgcgttttaggttttcgacggggaggtcgggagtttcgatgggacgttttagattcgggaggtggtcgtcgaggtcgtgttcgagattcgagaagcgggtgtttaggtcgtgtcggagattcgggaggtcggcgtggaggttgttttcgagatcgtggaggcggacgcgtgggtgatcgaggcgttgttggggttgtttgcggtcgtcgagcgcgagttagagttgttgcgcgttagtttggagtattagcgcggggtgagtgagtttttgcggggtcggttgcgggagttggaggaagttcgcgaggttgcggaggaggtagcggcgggggttcgggtttagttacgcgaggttattatttagatttcgtggagttgtgtcgaaaaggtcgcgtagatcgagttttcggtagaggcgttttttttgatttaggagagttcgttcggatttatggacggagatagggtcgtggcgttcgcgggtgagtttcgatttcgtcgttgggttttggtttattcggcgtcggattcgaatttagtgtttttattttattttcgttaggtatttttaaatttattatgaagaagagagacggtatatttggtgtttaatttagtttcggatttaagagtttgtagtttgttggggtttttaacggagagtgagcgtttttttttttttgtggtagtttttgtcgggatatagattggggttggaattttagttttgtttttttattggtagcgtggtttgggtaatttttagtttttttatcgttaaatgggaacggttatatttatatcgtaggattttagaacgagtttataggggaggtttagtagatattttttattttgtttttaggtacgagagtttttttagcgaggacgttagcgatagcgatggcgatagcgagaacggtggcgtcgagttttcgggtagtttttcgggtttcggggatgatagcggcgggggattcgattcgggtatttttggtttttttagcggcggggatattcgggattttgagttcgaggcggaggtagagttttagtaggtggtataggggaggtgagcggcgttcgttagttgtttggagaggaggcggttgttttttttttggtcggcgttgttttcgatttattttgagttttttttggttttttttgtaggtgcgagttgagttcgcgtttgagggaggcgtgcgtagcgttgtagcggtagttgagtcggtttcgcggagtagttagcgacggcgtgagtgtttcgggagcgtagtattagggagtggcgtgggagtttttaaggatttttgacgtttatttaggggagtatatcgggttttattttttttcgttaggtatttcgtttgattttaggtttttcgaagggattttttttttaggatagcgtcgatttttttttggtttttttaaaaaggttcggttttagttttattttcggattttttaagggtaagcgtttattgttttttttcgttttatgttttttcgtaaatttttttttggaaggaaaggatttttttttttcgtgtttgtttttcgataggggtgtggttttagttttttatttgggttcgtatggttttttatttggacgaggagtgattttttttatttgtttggaaacgttaaatgggtttttttttagtttcgtttttttttagtttttttattacggcgtcgtcgtggattatcgtcgatgttattttggtttttgttttttgtagggcgtagtgcgtttcgtggtttaggagtggtttcgagtgtttagttagcggcgtttttaggcggagttcgtggttaggatgttggaaggggtgaggcgtttgggattcgaattgttggcgtacgtggtgaatttggcggatggtaacgggaatacggttttgtattatagtgtgttttacgggaatttggttatcgtaagtttgtttttggatacgggttagagttaagggagggtgggtgggatattaggaaatgggtggggggagagggtaggggttgatttaggtttaaagattttggagaggaaagtagagaatggttgtttagtatagggtattatttttttttgagtttattttattttattttaattttattattttattt

SEQ ID NO: 160 - DNA, 3308 bp, homo sapiens
ttttattttataggaaagtttttttataggaaagtttttttggtaattaaatgttaaattgggttttttttgtttattttttgttattattattattgttgtaggtattgtttggaaggatgtttatttgttttttataggaggatagggatgtttgttttgtttattgttgtgttttttgggtttagaaatttgtttagtatagagtaggtgtttattaaataagtgattgagttaatatttgggtatagataggtgtgaagtgtgggtatgggtgggggatatgtttggtttgtttagtattttttgggtttttttgttttgatgtgttttttttgtgtttttgttgtgtttttagatttgggtggtttttgtttgtgtttggtttttgttgttgggggtgtatgtagtttgagtttgttttatttggtggagatgttttatggtttttatttggatttggatttttttaagtatatagaggagttggagtgtggttttgttgtttgttgtgttttgggatttttgattttgtgttgtttttgtgtgttttggtttggttttgtgggtgtatgtagtttaggtgtttggatatttagtgagtttttggttagtgatgatggtggagtattgggtatatttttttagggtgtgtttttggggtttttgatgtagttgttgttgttgtgtgtgtttgtgtgtaatttgtgtgttgagtatatgttttgggagattagttggtggttggagttggtgtagatatatgagtgtgtgtttagttttggttgtggggttttgtgtagtttatgtgggtttggttgtagtagttttgtttttaattttgtttttgttttgtttggttttgtttaattgtagttggtgtgtgagtagatggttgtggtgttgtggtgtttgtgtgagtttgaggattaggtgtgaatgttgtttgagttgtaggagtaggtgtgtgtgttgtgtgttgagaaggtgtggttgttggttgggtgtgtgtagtttgagttggatggggaggttgagatgtgtttggataagtttgtttagttgtggtggtttattgagtgtttggttatttttgagtgtggtggttgtgttagggttagtttttgggttgatagtttagatggtttggttgtagggtgtagtgagggtgtgttttaggtttttgatggggaggttgggagttttgatgggatgttttagatttgggaggtggttgttgaggttgtgtttgagatttgagaagtgggtgtttaggttgtgttggagatttgggaggttggtgtggaggttgtttttgagattgtggaggtggatgtgtgggtgattgaggtgttgttggggttgtttgtggttgttgagtgtgagttagagttgttgtgtgttagtttggagtattagtgtggggtgagtgagtttttgtggggttggttgtgggagttggaggaagtttgtgaggttgtggaggaggtagtggtgggggtttgggtttagttatgtgaggttattatttagattttgtggagttgtgttgaaaaggttgtgtagattgagtttttggtagaggtgttttttttgatttaggagagtttgtttggatttatggatggagatagggttgtggtgtttgtgggtgagttttgattttgttgttgggttttggtttatttggtgttggatttgaatttagtgtttttattttatttttgttaggtatttttaaatttattatgaagaagagagatggtatatttggtgtttaatttagttttggatttaagagtttgtagtttgttggggtttttaatggagagtgagtgtttttttttttttgtggtagtttttgttgggatatagattggggttggaattttagttttgtttttttattggtagtgtggtttgggtaatttttagtttttttattgttaaatgggaatggttatatttatattgtaggattttagaatgagtttataggggaggtttagtagatattttttattttgtttttaggtatgagagtttttttagtgaggatgttagtgatagtgatggtgatagtgagaatggtggtgttgagtttttgggtagttttttgggttttggggatgatagtggtgggggatttgatttgggtatttttggtttttttagtggtggggatatttgggattttgagtttgaggtggaggtagagttttagtaggtggtataggggaggtgagtggtgtttgttagttgtttggagaggaggtggttgttttttttttggttggtgttgtttttgatttattttgagttttttttggttttttttgtaggtgtgagttgagtttgtgtttgagggaggtgtgtgtagtgttgtagtggtagttgagttggttttgtggagtagttagtgatggtgtgagtgttttgggagtgtagtattagggagtggtgtgggagtttttaaggatttttgatgtttatttaggggagtatattgggttttatttttttttgttaggtattttgtttgattttaggttttttgaagggattttttttttaggatagtgttgatttttttttggtttttttaaaaaggtttggttttagttttatttttggattttttaagggtaagtgtttattgtttttttttgttttatgtttttttgtaaatttttttttggaaggaaaggattttttttttttgtgtttgttttttgataggggtgtggttttagttttttatttgggtttgtatggttttttatttggatgaggagtgattttttttatttgtttggaaatgttaaatgggtttttttttagttttgtttttttttagtttttttattatggtgttgttgtggattattgttgatgttattttggtttttgttttttgtagggtgtagtgtgttttgtggtttaggagtggttttgagtgtttagttagtggtgtttttaggtggagtttgtggttaggatgttggaaggggtgaggtgtttgggatttgaattgttggtgtatgtggtgaatttggtggatggtaatgggaatatggttttgtattatagtgtgttttatgggaatttggttattgtaagtttgtttttggatatgggttagagttaagggagggtgggtgggatattaggaaatgggtggggggagagggtaggggttgatttaggtttaaagattttggagaggaaagtagagaatggttgtttagtatagggtattatttttttttgagtttattttattttattttaattttattattttattt

SEQ ID NO: 161 - DNA, 50 bp, homo sapiens
tctttacaggtgcctgtagtggtggttactactatctttcagagtcatcg

SEQ ID NO: 162 - DNA, 50 bp, homo sapiens
tttttataggtgtttgtagtggtggttattattattttttagagttatcg

SEQ ID NO: 163 - DNA, 50 bp, homo sapiens
tttttataggtgtttgtagtggtggttattattattttttagagttattg

SEQ ID NO: 164 - DNA, 50 bp, homo sapiens
cgatgattttgaaagatagtagtaattattattataggtatttgtaaaga

SEQ ID NO: 165 - DNA, 50 bp, homo sapiens
tgatgattttgaaagatagtagtaattattattataggtatttgtaaaga

SEQ ID NO: 166 - DNA, 3001 bp, homo sapiens
ccccagtcagagaacataacaagcaattcagagcaacatattaagtccctatggggctccaacttggactgcttaagtcccaagaccacatcctggtgtctgggaagagtttgggtaatagaagagagggagaaggaaaatcagagaagcgatgaaagcgttctatttttctccttctcaacccccatcccagcatcttggaggctggtcaccagtctgggtgccatatccaccagaagccctaaatcaatatcccaaccacctgatacctaggctaaagacatgtgtatatcagccatctccttcccaaacacctcttatcgctctcaaggctcatatccttccagaagccatgccttatggcgactcagctcacccatactgtcctcttaaattaattcacttaattttctccaaatccatactttctctctgatatcatgtccctgatgttcttttaattaattcaatcaaaatgccatgaccctcatttccaataatccaccccatctatcttttctgccaaacccaacggggtgttgtgtcaccagatcaagatctttgttctcatctactcattcctacctccttcctattacccttttccaattccaagctcctaatcccactctttgggaagccctgggtttctaacttagtttagtatccctcctctttctcccattccaccccatcccatgatccttccattaggctccactagactacccttccctcaggattcaattcccctctccttgccacgccctgtgccccccggggctacttacaccaagttctccccacacttcaagcctctggccccgccttccccccaaaggaaggaggcgggagtagggagagaagggcggcgctcggcaacgtaaaagcgatctcccattagcgctcatcgccgccaatcgaggcttccttctctcccattggtcggctttggcctatgccccaccctcttcctcagacagggcccggccaccgcctcagcgcccccgtccaacacagactgggaggggagaccccagcctggaacgctgggactggccagagttgaaagggagactcccgtcagatcatggactagctaatgttaaaaggacttaccggctggtagctccgttgcctcccgcctgcccgcgctcggtcctacaatctgtctccagctcctcctttccccccttggcggaacggatactttcctcccgtccggccaggcgcgctcaactctcgcgagaagtcatgggtccgcgggggaagggcgagatccgtgggggctgagttggaaagcggccgagaggcgggggctccgggaaaagaaggggccgggcttactgtgggcagggctggggagggagactgagcgagtactgtccacacaggtcacacgtgttcggctgcagaatctagcgggagaaagaaaggaaaaaggagagaggatctttacaggtgcctgtagtggtggttactactatctttcagagtcatcgcttccttaacggcaaagtaatttaaaatacccttagcgctagaaatgaagtccatgtacggacaaagcaatccacccgcacagcaattctaacactaccattttactagccctattgccttgggtgaaaaccttctctgagtctctgtacaatgggactaacaatctcattttattcaaatagttgtaatgatcaaatgagatacatgaaactgcttggggattttttaaaatcactatattattcagcaaatattttcacaaaacgtagggcatactacatgcaaagcattgttctgcagtcgaatgctctatccctgagctataccccccgtgcaaagcattgttctaagcatggggttaaggagttaccaacccaggtagaatttatatttgagtgaggaaggggagacagttaaaaagccaataaacacaaatatttcaaatagtgaaaagcgcttcaggatagtgagacagaaggtgactaggagtggggaagaagctttactcctagtgtttgagagaagacctctttgaggaagtaacacaccaggagttgaattatgacctgggaagatttcgggggaaatatcaaatgcaaagtctatagtcttacatttatatgtcttgttcaagacaaaccaggaaaagaaaaaagaaaaacaaaaaacaggctgggtgcagtggctcacgtctgtaatcccaacactgctaggccgaggcaagaggatcgcctgagcccaggaatttgagaccagcctgggcaacatggcgaaaactcagctctacgaaaaaatataaaattagccgggcatggtggcctgcacctgtagtagctattcggggggctaagtgggaagatcgcttgagcccaggaggttgaggtggcagtgagcccacatcaggccactgcactccagcctggacaacagagtgaaaccctgtctcgataaataaataaaataaataattttcttaaaatttaacgaattgtagttgacttaaaatattatctatggaatctctgttctctccttttgcagctttatgttactcagctttctgaactttctgtctagcatctcatctatcctcacagcaccctctgagaggtaggaagaatctgggtgatttctccctagatacctaaaatgaaacagatgtaaaatctttctttcttatgtagtgaattgagaaaagttgagaggagtcttggcttccaaactattctcccctaaaacaattcctacttaaaagaatacagtgatggaaacataccttaaatatataagaaaaatttgtatgttggccgggcgcagtggctcacgcctgtaaatcccagctactcaggaggccgaggcaagagaatcacttgaacctggaaagcggaggttgcagtgagccaagatcccgccattgcactccagcctgggcaacaacagcgaaactccgtgtcaaaataaataaataaataaataaataaataaataaataaaaata

SEQ ID NO: 167 - DNA, 3001 bp, homo sapiens
ttttagttagagaatataataagtaatttagagtaatatattaagtttttatggggttttaatttggattgtttaagttttaagattatattttggtgtttgggaagagtttgggtaatagaagagagggagaaggaaaattagagaagcgatgaaagcgttttattttttttttttttaatttttattttagtattttggaggttggttattagtttgggtgttatatttattagaagttttaaattaatattttaattatttgatatttaggttaaagatatgtgtatattagttattttttttttaaatattttttatcgtttttaaggtttatatttttttagaagttatgttttatggcgatttagtttatttatattgtttttttaaattaatttatttaattttttttaaatttatattttttttttgatattatgtttttgatgtttttttaattaatttaattaaaatgttatgatttttatttttaataatttattttatttattttttttgttaaatttaacggggtgttgtgttattagattaagatttttgtttttatttatttatttttattttttttttattatttttttttaattttaagtttttaattttattttttgggaagttttgggtttttaatttagtttagtatttttttttttttttttattttattttattttatgatttttttattaggttttattagattattttttttttaggatttaatttttttttttttgttacgttttgtgtttttcggggttatttatattaagttttttttatattttaagtttttggtttcgttttttttttaaaggaaggaggcgggagtagggagagaagggcggcgttcggtaacgtaaaagcgattttttattagcgtttatcgtcgttaatcgaggttttttttttttttattggtcggttttggtttatgttttatttttttttttagatagggttcggttatcgttttagcgttttcgtttaatatagattgggaggggagattttagtttggaacgttgggattggttagagttgaaagggagattttcgttagattatggattagttaatgttaaaaggatttatcggttggtagtttcgttgtttttcgtttgttcgcgttcggttttataatttgtttttagttttttttttttttttttggcggaacggatatttttttttcgttcggttaggcgcgtttaattttcgcgagaagttatgggttcgcgggggaagggcgagattcgtgggggttgagttggaaagcggtcgagaggcgggggtttcgggaaaagaaggggtcgggtttattgtgggtagggttggggagggagattgagcgagtattgtttatataggttatacgtgttcggttgtagaatttagcgggagaaagaaaggaaaaaggagagaggatttttataggtgtttgtagtggtggttattattattttttagagttatcgtttttttaacggtaaagtaatttaaaatatttttagcgttagaaatgaagtttatgtacggataaagtaatttattcgtatagtaattttaatattattattttattagttttattgttttgggtgaaaattttttttgagtttttgtataatgggattaataattttattttatttaaatagttgtaatgattaaatgagatatatgaaattgtttggggattttttaaaattattatattatttagtaaatatttttataaaacgtagggtatattatatgtaaagtattgttttgtagtcgaatgttttatttttgagttatatttttcgtgtaaagtattgttttaagtatggggttaaggagttattaatttaggtagaatttatatttgagtgaggaaggggagatagttaaaaagttaataaatataaatattttaaatagtgaaaagcgttttaggatagtgagatagaaggtgattaggagtggggaagaagttttatttttagtgtttgagagaagatttttttgaggaagtaatatattaggagttgaattatgatttgggaagatttcgggggaaatattaaatgtaaagtttatagttttatatttatatgttttgtttaagataaattaggaaaagaaaaaagaaaaataaaaaataggttgggtgtagtggtttacgtttgtaattttaatattgttaggtcgaggtaagaggatcgtttgagtttaggaatttgagattagtttgggtaatatggcgaaaatttagttttacgaaaaaatataaaattagtcgggtatggtggtttgtatttgtagtagttattcggggggttaagtgggaagatcgtttgagtttaggaggttgaggtggtagtgagtttatattaggttattgtattttagtttggataatagagtgaaattttgtttcgataaataaataaaataaataatttttttaaaatttaacgaattgtagttgatttaaaatattatttatggaatttttgttttttttttttgtagttttatgttatttagttttttgaattttttgtttagtattttatttatttttatagtattttttgagaggtaggaagaatttgggtgatttttttttagatatttaaaatgaaatagatgtaaaattttttttttttatgtagtgaattgagaaaagttgagaggagttttggtttttaaattatttttttttaaaataatttttatttaaaagaatatagtgatggaaatatattttaaatatataagaaaaatttgtatgttggtcgggcgtagtggtttacgtttgtaaattttagttatttaggaggtcgaggtaagagaattatttgaatttggaaagcggaggttgtagtgagttaagatttcgttattgtattttagtttgggtaataatagcgaaatttcgtgttaaaataaataaataaataaataaataaataaataaataaaaata

SEQ ID NO: 168 - DNA, 3001 bp, homo sapiens
ttttagttagagaatataataagtaatttagagtaatatattaagtttttatggggttttaatttggattgtttaagttttaagattatattttggtgtttgggaagagtttgggtaatagaagagagggagaaggaaaattagagaagtgatgaaagtgttttattttttttttttttaatttttattttagtattttggaggttggttattagtttgggtgttatatttattagaagttttaaattaatattttaattatttgatatttaggttaaagatatgtgtatattagttattttttttttaaatattttttattgtttttaaggtttatatttttttagaagttatgttttatggtgatttagtttatttatattgtttttttaaattaatttatttaattttttttaaatttatattttttttttgatattatgtttttgatgtttttttaattaatttaattaaaatgttatgatttttatttttaataatttattttatttattttttttgttaaatttaatggggtgttgtgttattagattaagatttttgtttttatttatttatttttattttttttttattatttttttttaattttaagtttttaattttattttttgggaagttttgggtttttaatttagtttagtatttttttttttttttttattttattttattttatgatttttttattaggttttattagattattttttttttaggatttaatttttttttttttgttatgttttgtgttttttggggttatttatattaagttttttttatattttaagtttttggttttgttttttttttaaaggaaggaggtgggagtagggagagaagggtggtgtttggtaatgtaaaagtgattttttattagtgtttattgttgttaattgaggttttttttttttttattggttggttttggtttatgttttatttttttttttagatagggtttggttattgttttagtgtttttgtttaatatagattgggaggggagattttagtttggaatgttgggattggttagagttgaaagggagatttttgttagattatggattagttaatgttaaaaggatttattggttggtagttttgttgttttttgtttgtttgtgtttggttttataatttgtttttagttttttttttttttttttggtggaatggatattttttttttgtttggttaggtgtgtttaatttttgtgagaagttatgggtttgtgggggaagggtgagatttgtgggggttgagttggaaagtggttgagaggtgggggttttgggaaaagaaggggttgggtttattgtgggtagggttggggagggagattgagtgagtattgtttatataggttatatgtgtttggttgtagaatttagtgggagaaagaaaggaaaaaggagagaggatttttataggtgtttgtagtggtggttattattattttttagagttattgtttttttaatggtaaagtaatttaaaatatttttagtgttagaaatgaagtttatgtatggataaagtaatttatttgtatagtaattttaatattattattttattagttttattgttttgggtgaaaattttttttgagtttttgtataatgggattaataattttattttatttaaatagttgtaatgattaaatgagatatatgaaattgtttggggattttttaaaattattatattatttagtaaatatttttataaaatgtagggtatattatatgtaaagtattgttttgtagttgaatgttttatttttgagttatattttttgtgtaaagtattgttttaagtatggggttaaggagttattaatttaggtagaatttatatttgagtgaggaaggggagatagttaaaaagttaataaatataaatattttaaatagtgaaaagtgttttaggatagtgagatagaaggtgattaggagtggggaagaagttttatttttagtgtttgagagaagatttttttgaggaagtaatatattaggagttgaattatgatttgggaagattttgggggaaatattaaatgtaaagtttatagttttatatttatatgttttgtttaagataaattaggaaaagaaaaaagaaaaataaaaaataggttgggtgtagtggtttatgtttgtaattttaatattgttaggttgaggtaagaggattgtttgagtttaggaatttgagattagtttgggtaatatggtgaaaatttagttttatgaaaaaatataaaattagttgggtatggtggtttgtatttgtagtagttatttggggggttaagtgggaagattgtttgagtttaggaggttgaggtggtagtgagtttatattaggttattgtattttagtttggataatagagtgaaattttgttttgataaataaataaaataaataatttttttaaaatttaatgaattgtagttgatttaaaatattatttatggaatttttgttttttttttttgtagttttatgttatttagttttttgaattttttgtttagtattttatttatttttatagtattttttgagaggtaggaagaatttgggtgatttttttttagatatttaaaatgaaatagatgtaaaattttttttttttatgtagtgaattgagaaaagttgagaggagttttggtttttaaattatttttttttaaaataatttttatttaaaagaatatagtgatggaaatatattttaaatatataagaaaaatttgtatgttggttgggtgtagtggtttatgtttgtaaattttagttatttaggaggttgaggtaagagaattatttgaatttggaaagtggaggttgtagtgagttaagattttgttattgtattttagtttgggtaataatagtgaaattttgtgttaaaataaataaataaataaataaataaataaataaataaaaata

SEQ ID NO: 169 - DNA, 3001 bp, homo sapiens
tatttttatttatttatttatttatttatttatttatttattttgatacggagtttcgttgttgttgtttaggttggagtgtaatggcgggattttggtttattgtaattttcgttttttaggtttaagtgatttttttgtttcggttttttgagtagttgggatttataggcgtgagttattgcgttcggttaatatataaattttttttatatatttaaggtatgtttttattattgtatttttttaagtaggaattgttttaggggagaatagtttggaagttaagattttttttaattttttttaatttattatataagaaagaaagattttatatttgttttattttaggtatttagggagaaattatttagattttttttattttttagagggtgttgtgaggatagatgagatgttagatagaaagtttagaaagttgagtaatataaagttgtaaaaggagagaatagagattttatagataatattttaagttaattataattcgttaaattttaagaaaattatttattttatttatttatcgagatagggttttattttgttgtttaggttggagtgtagtggtttgatgtgggtttattgttattttaattttttgggtttaagcgatttttttatttagtttttcgaatagttattataggtgtaggttattatgttcggttaattttatattttttcgtagagttgagttttcgttatgttgtttaggttggttttaaatttttgggtttaggcgatttttttgtttcggtttagtagtgttgggattatagacgtgagttattgtatttagtttgttttttgttttttttttttttttttttggtttgttttgaataagatatataaatgtaagattatagattttgtatttgatatttttttcgaaatttttttaggttataatttaatttttggtgtgttatttttttaaagaggtttttttttaaatattaggagtaaagttttttttttatttttagttattttttgttttattattttgaagcgttttttattatttgaaatatttgtgtttattggttttttaattgtttttttttttttatttaaatataaattttatttgggttggtaattttttaattttatgtttagaataatgttttgtacggggggtatagtttagggatagagtattcgattgtagaataatgttttgtatgtagtatgttttacgttttgtgaaaatatttgttgaataatatagtgattttaaaaaatttttaagtagttttatgtattttatttgattattataattatttgaataaaatgagattgttagttttattgtatagagatttagagaaggtttttatttaaggtaatagggttagtaaaatggtagtgttagaattgttgtgcgggtggattgttttgttcgtatatggattttatttttagcgttaagggtattttaaattattttgtcgttaaggaagcgatgattttgaaagatagtagtaattattattataggtatttgtaaagattttttttttttttttttttttttttttcgttagattttgtagtcgaatacgtgtgatttgtgtggatagtattcgtttagtttttttttttagttttgtttatagtaagttcggtttttttttttttcggagttttcgtttttcggtcgttttttaatttagtttttacggatttcgtttttttttcgcggatttatgatttttcgcgagagttgagcgcgtttggtcggacgggaggaaagtattcgtttcgttaaggggggaaaggaggagttggagatagattgtaggatcgagcgcgggtaggcgggaggtaacggagttattagtcggtaagtttttttaatattagttagtttatgatttgacgggagttttttttttaattttggttagttttagcgttttaggttggggtttttttttttagtttgtgttggacgggggcgttgaggcggtggtcgggttttgtttgaggaagagggtggggtataggttaaagtcgattaatgggagagaaggaagtttcgattggcggcgatgagcgttaatgggagatcgtttttacgttgtcgagcgtcgtttttttttttttattttcgttttttttttttggggggaaggcggggttagaggtttgaagtgtggggagaatttggtgtaagtagtttcggggggtatagggcgtggtaaggagaggggaattgaattttgagggaagggtagtttagtggagtttaatggaaggattatgggatggggtggaatgggagaaagaggagggatattaaattaagttagaaatttagggttttttaaagagtgggattaggagtttggaattggaaaagggtaataggaaggaggtaggaatgagtagatgagaataaagattttgatttggtgatataatatttcgttgggtttggtagaaaagatagatggggtggattattggaaatgagggttatggtattttgattgaattaattaaaagaatattagggatatgatattagagagaaagtatggatttggagaaaattaagtgaattaatttaagaggatagtatgggtgagttgagtcgttataaggtatggtttttggaaggatatgagttttgagagcgataagaggtgtttgggaaggagatggttgatatatatatgtttttagtttaggtattaggtggttgggatattgatttagggtttttggtggatatggtatttagattggtgattagtttttaagatgttgggatgggggttgagaaggagaaaaatagaacgtttttatcgtttttttgatttttttttttttttttttttattatttaaattttttttagatattaggatgtggttttgggatttaagtagtttaagttggagttttatagggatttaatatgttgttttgaattgtttgttatgttttttgattgggg

SEQ ID NO: 170 - DNA, 3001 bp, homo sapiens
tatttttatttatttatttatttatttatttatttatttattttgatatggagttttgttgttgttgtttaggttggagtgtaatggtgggattttggtttattgtaatttttgttttttaggtttaagtgatttttttgttttggttttttgagtagttgggatttataggtgtgagttattgtgtttggttaatatataaattttttttatatatttaaggtatgtttttattattgtatttttttaagtaggaattgttttaggggagaatagtttggaagttaagattttttttaattttttttaatttattatataagaaagaaagattttatatttgttttattttaggtatttagggagaaattatttagattttttttattttttagagggtgttgtgaggatagatgagatgttagatagaaagtttagaaagttgagtaatataaagttgtaaaaggagagaatagagattttatagataatattttaagttaattataatttgttaaattttaagaaaattatttattttatttatttattgagatagggttttattttgttgtttaggttggagtgtagtggtttgatgtgggtttattgttattttaattttttgggtttaagtgatttttttatttagttttttgaatagttattataggtgtaggttattatgtttggttaattttatatttttttgtagagttgagtttttgttatgttgtttaggttggttttaaatttttgggtttaggtgatttttttgttttggtttagtagtgttgggattatagatgtgagttattgtatttagtttgttttttgttttttttttttttttttttggtttgttttgaataagatatataaatgtaagattatagattttgtatttgatattttttttgaaatttttttaggttataatttaatttttggtgtgttatttttttaaagaggtttttttttaaatattaggagtaaagttttttttttatttttagttattttttgttttattattttgaagtgttttttattatttgaaatatttgtgtttattggttttttaattgtttttttttttttatttaaatataaattttatttgggttggtaattttttaattttatgtttagaataatgttttgtatggggggtatagtttagggatagagtatttgattgtagaataatgttttgtatgtagtatgttttatgttttgtgaaaatatttgttgaataatatagtgattttaaaaaatttttaagtagttttatgtattttatttgattattataattatttgaataaaatgagattgttagttttattgtatagagatttagagaaggtttttatttaaggtaatagggttagtaaaatggtagtgttagaattgttgtgtgggtggattgttttgtttgtatatggattttatttttagtgttaagggtattttaaattattttgttgttaaggaagtgatgattttgaaagatagtagtaattattattataggtatttgtaaagatttttttttttttttttttttttttttttgttagattttgtagttgaatatgtgtgatttgtgtggatagtatttgtttagtttttttttttagttttgtttatagtaagtttggttttttttttttttggagtttttgttttttggttgttttttaatttagtttttatggattttgttttttttttgtggatttatgattttttgtgagagttgagtgtgtttggttggatgggaggaaagtatttgttttgttaaggggggaaaggaggagttggagatagattgtaggattgagtgtgggtaggtgggaggtaatggagttattagttggtaagtttttttaatattagttagtttatgatttgatgggagttttttttttaattttggttagttttagtgttttaggttggggtttttttttttagtttgtgttggatgggggtgttgaggtggtggttgggttttgtttgaggaagagggtggggtataggttaaagttgattaatgggagagaaggaagttttgattggtggtgatgagtgttaatgggagattgtttttatgttgttgagtgttgtttttttttttttatttttgttttttttttttggggggaaggtggggttagaggtttgaagtgtggggagaatttggtgtaagtagttttggggggtatagggtgtggtaaggagaggggaattgaattttgagggaagggtagtttagtggagtttaatggaaggattatgggatggggtggaatgggagaaagaggagggatattaaattaagttagaaatttagggttttttaaagagtgggattaggagtttggaattggaaaagggtaataggaaggaggtaggaatgagtagatgagaataaagattttgatttggtgatataatattttgttgggtttggtagaaaagatagatggggtggattattggaaatgagggttatggtattttgattgaattaattaaaagaatattagggatatgatattagagagaaagtatggatttggagaaaattaagtgaattaatttaagaggatagtatgggtgagttgagttgttataaggtatggtttttggaaggatatgagttttgagagtgataagaggtgtttgggaaggagatggttgatatatatatgtttttagtttaggtattaggtggttgggatattgatttagggtttttggtggatatggtatttagattggtgattagtttttaagatgttgggatgggggttgagaaggagaaaaatagaatgtttttattgtttttttgatttttttttttttttttttttattatttaaattttttttagatattaggatgtggttttgggatttaagtagtttaagttggagttttatagggatttaatatgttgttttgaattgtttgttatgttttttgattgggg

SEQ ID NO: 171 - DNA, 50 bp, homo sapiens
taatcccactgagaccctggttgtttgcttataatgacgacctttggtcg

SEQ ID NO: 172 - DNA, 50 bp, homo sapiens
taattttattgagattttggttgtttgtttataatgacgatttttggtcg

SEQ ID NO: 173 - DNA, 50 bp, homo sapiens
taattttattgagattttggttgtttgtttataatgatgatttttggttg

SEQ ID NO: 174 - DNA, 50 bp, homo sapiens
cgattaaaggtcgttattataagtaaataattagggttttagtgggatta

SEQ ID NO: 175 - DNA, 50 bp, homo sapiens
tgattaaaggttgttattataagtaaataattagggttttagtgggatta

SEQ ID NO: 176 - DNA, 3001 bp, homo sapiens
gcaacttaagctgaaggacccctgtctgggaacattccttgatttaaaaaaaattaattaatgggtttttatgagtcagggtcttgctctgtcacccagtctggagtgcagtggcatagtcacagcagtctcgacctctgggattaaccaatcctctcatctcagccctggagtaactgggactacagccacatgccaccacacatggctaatttttttattttttttgtagagatggggtttcactgtgttgcccaggctggtcttgaacaactgggctcaagtgatcctctcgcctcagcctctcaaagagctgggattacaggtgtgagccaccatcctgggccttgggaacattcctaagagagctattcctcccttacctgtttagatgaattcactgggctattcaagaaggaggcagacacaggcctgattagacccctggtacaacagcggatctgtaaaatcagaaagccacatcctaccaaatcagtcaaggaaaaaaaatcctaattgctgagctgtcaaaaatgactacagatttcataaacagaataagttcaatgtatttcaaggtcaatttattcctgttcctatcagataggcctgccccagagacagctgtctcaatagcttgatatagtcagcagtggcaaccttcaccattcaaaaccaaaccaaagttcacttctttgggcacagctttaatcagcttctcagaatggaacaagaacccacactaataccaaagcaggtacaggaaaggtttatacccagatcaccaagtaatcagatgggggaaattttattctgctaaaatacactcacagctacacaccctaaatggagtgggccagtcagccccggaaaccgactggaatagccatccaaggagagccatctgtaacatggcttttttgaaataatttttagtgcagtggttctcaaacttggctgcacggtggaatcatctggagaagtcttaaaagatacagatgcctgggttccacccccattcccaaagtctgatgcaaatggtctaaggtgcagcctaggcatcaggattttaaaaagttccctggatgattctaacgtgcagccactgttgaaaaccactgttttagtgggctgtctctatggccaggacagactggggataaaaatcaaatccagactctctgaccacattccaaagccaagatagcttggttcacaggcccagataaacaggggttaccttcatcacatcctacagccacctcaaagagcctacatcatcaggacgccaagctcccctgggttcattcattaaacactgatggcgtccacaccatacacctggtactacagagcactgcggcgcggcaccttaccagagctggagaaatgaataatgccccggcggtctgcattttttcagtctgcagagggggaaaaaatagtaataataatcccactgagaccctggttgtttgcttataatgacgacctttggtcgtccccttcacccccgtccgtcctccctagaccacgctcttccttgcaccgtgccccagctgaggagggcattagaggtcagagggacagagcagtgggtcttcaaagcaaagtcatggagatcggaagtcaaggaaatgtgcccaagccccaggaaggaaatgttgcgaaagggaatggtctctcgggaagactggaggcggatactgggcaggtgtcgcgcaggatcctgcccatcttacacagcagtccccgacccgccccagccgaggcagtcaatcgttcattaccgttggtaattaacattcattgataaggccatatctagattgccatagcctctcccagcactggggggaaatacccctccacactgcccagcccacaaccctgcctattgctggctcccggccccaagtcacctgcactcctactaccctgcaacccctgcttggcccacagcgctcgcccggctcaaggtgacagactcacctcccagctttagcccttggtctcagcgctcagcttcccccacccacgtgtcctggaccttctccattctcattggccgtaatatccccgcgtccccattggttgacgtcatcgattccccactcttattggctttccgcagctgcttcctctccctccacaggagcttcgtggcaattcccgcctccatgcggatagaggcggggctttcctacgagatctggattacgattggccgatccctgaaacgctcgaccatagagttggcgggactcagaggttccataacctcgcgcacaagatggcgaccaaggtgtacgctgaagaaaaaggcgtgggagagatgacgggacgtgtgacgcagtcagacacatgactttggccccgagccttcattcgggcgcttgggccacggggcgcgttgcatgttgggattggtagttgcgctgagggggggggcccaaggacagctgagatcccgcgagatattctaggccgggagagccgatgcctttgcagtaattcccaccgtggaggtttgtggaaagaccgctttccatggagagtaaaggccggctggaaagtccccaagcggtgagcgcagttttgtggacctcagccggtgttcagcagtcatggactatcatccagatggctttctaaaacatttgttgggccgggtgcagtggctcacgcctgtaatcccagcactttgggaggccgaggcgggcggatcacctgaggtcaggagttcgagatcagcctgaccagcatggtgaaaccccgtctctactaagaatacaaaaattagccgggcatggtggtggcgcgtgcctgtaatcccagctacttgggaggctgaggcaggagaatcgcttgaacccgggaggccgaggttgcagggagccgagatcgcgccactgcactccagcctgggcaactgagcaggattccgtctcgggggaaaaaacaaacaaaaaaattgtttattttgtaaaaacaacactga

SEQ ID NO: 177 - DNA, 3001 bp, homo sapiens
gtaatttaagttgaaggatttttgtttgggaatattttttgatttaaaaaaaattaattaatgggtttttatgagttagggttttgttttgttatttagtttggagtgtagtggtatagttatagtagtttcgatttttgggattaattaatttttttattttagttttggagtaattgggattatagttatatgttattatatatggttaatttttttattttttttgtagagatggggttttattgtgttgtttaggttggttttgaataattgggtttaagtgattttttcgttttagttttttaaagagttgggattataggtgtgagttattattttgggttttgggaatatttttaagagagttattttttttttatttgtttagatgaatttattgggttatttaagaaggaggtagatataggtttgattagatttttggtataatagcggatttgtaaaattagaaagttatattttattaaattagttaaggaaaaaaaattttaattgttgagttgttaaaaatgattatagattttataaatagaataagtttaatgtattttaaggttaatttatttttgtttttattagataggtttgttttagagatagttgttttaatagtttgatatagttagtagtggtaatttttattatttaaaattaaattaaagtttatttttttgggtatagttttaattagttttttagaatggaataagaatttatattaatattaaagtaggtataggaaaggtttatatttagattattaagtaattagatgggggaaattttattttgttaaaatatatttatagttatatattttaaatggagtgggttagttagtttcggaaatcgattggaatagttatttaaggagagttatttgtaatatggtttttttgaaataatttttagtgtagtggtttttaaatttggttgtacggtggaattatttggagaagttttaaaagatatagatgtttgggttttatttttatttttaaagtttgatgtaaatggtttaaggtgtagtttaggtattaggattttaaaaagttttttggatgattttaacgtgtagttattgttgaaaattattgttttagtgggttgtttttatggttaggatagattggggataaaaattaaatttagattttttgattatattttaaagttaagatagtttggtttataggtttagataaataggggttatttttattatattttatagttattttaaagagtttatattattaggacgttaagtttttttgggtttatttattaaatattgatggcgtttatattatatatttggtattatagagtattgcggcgcggtattttattagagttggagaaatgaataatgtttcggcggtttgtatttttttagtttgtagagggggaaaaaatagtaataataattttattgagattttggttgtttgtttataatgacgatttttggtcgttttttttattttcgttcgttttttttagattacgtttttttttgtatcgtgttttagttgaggagggtattagaggttagagggatagagtagtgggtttttaaagtaaagttatggagatcggaagttaaggaaatgtgtttaagttttaggaaggaaatgttgcgaaagggaatggtttttcgggaagattggaggcggatattgggtaggtgtcgcgtaggattttgtttattttatatagtagttttcgattcgttttagtcgaggtagttaatcgtttattatcgttggtaattaatatttattgataaggttatatttagattgttatagttttttttagtattggggggaaatatttttttatattgtttagtttataattttgtttattgttggttttcggttttaagttatttgtatttttattattttgtaatttttgtttggtttatagcgttcgttcggtttaaggtgatagatttattttttagttttagtttttggttttagcgtttagttttttttatttacgtgttttggattttttttatttttattggtcgtaatattttcgcgtttttattggttgacgttatcgattttttatttttattggtttttcgtagttgttttttttttttttataggagtttcgtggtaattttcgtttttatgcggatagaggcggggtttttttacgagatttggattacgattggtcgatttttgaaacgttcgattatagagttggcgggatttagaggttttataatttcgcgtataagatggcgattaaggtgtacgttgaagaaaaaggcgtgggagagatgacgggacgtgtgacgtagttagatatatgattttggtttcgagtttttattcgggcgtttgggttacggggcgcgttgtatgttgggattggtagttgcgttgagggggggggtttaaggatagttgagatttcgcgagatattttaggtcgggagagtcgatgtttttgtagtaatttttatcgtggaggtttgtggaaagatcgttttttatggagagtaaaggtcggttggaaagtttttaagcggtgagcgtagttttgtggattttagtcggtgtttagtagttatggattattatttagatggttttttaaaatatttgttgggtcgggtgtagtggtttacgtttgtaattttagtattttgggaggtcgaggcgggcggattatttgaggttaggagttcgagattagtttgattagtatggtgaaatttcgtttttattaagaatataaaaattagtcgggtatggtggtggcgcgtgtttgtaattttagttatttgggaggttgaggtaggagaatcgtttgaattcgggaggtcgaggttgtagggagtcgagatcgcgttattgtattttagtttgggtaattgagtaggatttcgtttcgggggaaaaaataaataaaaaaattgtttattttgtaaaaataatattga

SEQ ID NO: 178 - DNA, 3001 bp, homo sapiens
gtaatttaagttgaaggatttttgtttgggaatattttttgatttaaaaaaaattaattaatgggtttttatgagttagggttttgttttgttatttagtttggagtgtagtggtatagttatagtagttttgatttttgggattaattaatttttttattttagttttggagtaattgggattatagttatatgttattatatatggttaatttttttattttttttgtagagatggggttttattgtgttgtttaggttggttttgaataattgggtttaagtgatttttttgttttagttttttaaagagttgggattataggtgtgagttattattttgggttttgggaatatttttaagagagttattttttttttatttgtttagatgaatttattgggttatttaagaaggaggtagatataggtttgattagatttttggtataatagtggatttgtaaaattagaaagttatattttattaaattagttaaggaaaaaaaattttaattgttgagttgttaaaaatgattatagattttataaatagaataagtttaatgtattttaaggttaatttatttttgtttttattagataggtttgttttagagatagttgttttaatagtttgatatagttagtagtggtaatttttattatttaaaattaaattaaagtttatttttttgggtatagttttaattagttttttagaatggaataagaatttatattaatattaaagtaggtataggaaaggtttatatttagattattaagtaattagatgggggaaattttattttgttaaaatatatttatagttatatattttaaatggagtgggttagttagttttggaaattgattggaatagttatttaaggagagttatttgtaatatggtttttttgaaataatttttagtgtagtggtttttaaatttggttgtatggtggaattatttggagaagttttaaaagatatagatgtttgggttttatttttatttttaaagtttgatgtaaatggtttaaggtgtagtttaggtattaggattttaaaaagttttttggatgattttaatgtgtagttattgttgaaaattattgttttagtgggttgtttttatggttaggatagattggggataaaaattaaatttagattttttgattatattttaaagttaagatagtttggtttataggtttagataaataggggttatttttattatattttatagttattttaaagagtttatattattaggatgttaagtttttttgggtttatttattaaatattgatggtgtttatattatatatttggtattatagagtattgtggtgtggtattttattagagttggagaaatgaataatgttttggtggtttgtatttttttagtttgtagagggggaaaaaatagtaataataattttattgagattttggttgtttgtttataatgatgatttttggttgttttttttatttttgtttgttttttttagattatgtttttttttgtattgtgttttagttgaggagggtattagaggttagagggatagagtagtgggtttttaaagtaaagttatggagattggaagttaaggaaatgtgtttaagttttaggaaggaaatgttgtgaaagggaatggttttttgggaagattggaggtggatattgggtaggtgttgtgtaggattttgtttattttatatagtagtttttgatttgttttagttgaggtagttaattgtttattattgttggtaattaatatttattgataaggttatatttagattgttatagttttttttagtattggggggaaatatttttttatattgtttagtttataattttgtttattgttggtttttggttttaagttatttgtatttttattattttgtaatttttgtttggtttatagtgtttgtttggtttaaggtgatagatttattttttagttttagtttttggttttagtgtttagttttttttatttatgtgttttggattttttttatttttattggttgtaatatttttgtgtttttattggttgatgttattgattttttatttttattggttttttgtagttgttttttttttttttataggagttttgtggtaatttttgtttttatgtggatagaggtggggtttttttatgagatttggattatgattggttgatttttgaaatgtttgattatagagttggtgggatttagaggttttataattttgtgtataagatggtgattaaggtgtatgttgaagaaaaaggtgtgggagagatgatgggatgtgtgatgtagttagatatatgattttggttttgagtttttatttgggtgtttgggttatggggtgtgttgtatgttgggattggtagttgtgttgagggggggggtttaaggatagttgagattttgtgagatattttaggttgggagagttgatgtttttgtagtaatttttattgtggaggtttgtggaaagattgttttttatggagagtaaaggttggttggaaagtttttaagtggtgagtgtagttttgtggattttagttggtgtttagtagttatggattattatttagatggttttttaaaatatttgttgggttgggtgtagtggtttatgtttgtaattttagtattttgggaggttgaggtgggtggattatttgaggttaggagtttgagattagtttgattagtatggtgaaattttgtttttattaagaatataaaaattagttgggtatggtggtggtgtgtgtttgtaattttagttatttgggaggttgaggtaggagaattgtttgaatttgggaggttgaggttgtagggagttgagattgtgttattgtattttagtttgggtaattgagtaggattttgttttgggggaaaaaataaataaaaaaattgtttattttgtaaaaataatattga

SEQ ID NO: 179 - DNA, 3001 bp, homo sapiens
ttagtgttgtttttataaaataaataatttttttgtttgttttttttttcgagacggaattttgtttagttgtttaggttggagtgtagtggcgcgatttcggttttttgtaatttcggtttttcgggtttaagcgatttttttgttttagttttttaagtagttgggattataggtacgcgttattattatgttcggttaatttttgtatttttagtagagacggggttttattatgttggttaggttgatttcgaatttttgattttaggtgattcgttcgtttcggttttttaaagtgttgggattataggcgtgagttattgtattcggtttaataaatgttttagaaagttatttggatgatagtttatgattgttgaatatcggttgaggtttataaaattgcgtttatcgtttggggattttttagtcggtttttattttttatggaaagcggtttttttataaatttttacggtgggaattattgtaaaggtatcggttttttcggtttagaatatttcgcgggattttagttgtttttgggtttttttttttagcgtaattattaattttaatatgtaacgcgtttcgtggtttaagcgttcgaatgaaggttcggggttaaagttatgtgtttgattgcgttatacgtttcgttattttttttacgtttttttttttagcgtatattttggtcgttattttgtgcgcgaggttatggaatttttgagtttcgttaattttatggtcgagcgttttagggatcggttaatcgtaatttagatttcgtaggaaagtttcgtttttattcgtatggaggcgggaattgttacgaagtttttgtggagggagaggaagtagttgcggaaagttaataagagtggggaatcgatgacgttaattaatggggacgcggggatattacggttaatgagaatggagaaggtttaggatacgtgggtgggggaagttgagcgttgagattaagggttaaagttgggaggtgagtttgttattttgagtcgggcgagcgttgtgggttaagtaggggttgtagggtagtaggagtgtaggtgatttggggtcgggagttagtaataggtagggttgtgggttgggtagtgtggaggggtatttttttttagtgttgggagaggttatggtaatttagatatggttttattaatgaatgttaattattaacggtaatgaacgattgattgtttcggttggggcgggtcggggattgttgtgtaagatgggtaggattttgcgcgatatttgtttagtattcgtttttagttttttcgagagattattttttttcgtaatattttttttttggggtttgggtatatttttttgattttcgatttttatgattttgttttgaagatttattgttttgtttttttgatttttaatgttttttttagttggggtacggtgtaaggaagagcgtggtttagggaggacggacgggggtgaaggggacgattaaaggtcgttattataagtaaataattagggttttagtgggattattattattattttttttttttttgtagattgaaaaaatgtagatcgtcggggtattatttatttttttagttttggtaaggtgtcgcgtcgtagtgttttgtagtattaggtgtatggtgtggacgttattagtgtttaatgaatgaatttaggggagtttggcgttttgatgatgtaggttttttgaggtggttgtaggatgtgatgaaggtaatttttgtttatttgggtttgtgaattaagttattttggttttggaatgtggttagagagtttggatttgatttttatttttagtttgttttggttatagagatagtttattaaaatagtggtttttaatagtggttgtacgttagaattatttagggaattttttaaaattttgatgtttaggttgtattttagattatttgtattagattttgggaatgggggtggaatttaggtatttgtattttttaagatttttttagatgattttatcgtgtagttaagtttgagaattattgtattaaaaattattttaaaaaagttatgttatagatggttttttttggatggttattttagtcggttttcggggttgattggtttattttatttagggtgtgtagttgtgagtgtattttagtagaataaaattttttttatttgattatttggtgatttgggtataaattttttttgtatttgttttggtattagtgtgggtttttgttttattttgagaagttgattaaagttgtgtttaaagaagtgaattttggtttggttttgaatggtgaaggttgttattgttgattatattaagttattgagatagttgtttttggggtaggtttatttgataggaataggaataaattgattttgaaatatattgaatttattttgtttatgaaatttgtagttatttttgatagtttagtaattaggattttttttttttgattgatttggtaggatgtggttttttgattttatagattcgttgttgtattaggggtttaattaggtttgtgtttgttttttttttgaatagtttagtgaatttatttaaataggtaagggaggaatagtttttttaggaatgtttttaaggtttaggatggtggtttatatttgtaattttagttttttgagaggttgaggcgagaggattatttgagtttagttgtttaagattagtttgggtaatatagtgaaattttatttttataaaaaaaataaaaaaattagttatgtgtggtggtatgtggttgtagttttagttattttagggttgagatgagaggattggttaattttagaggtcgagattgttgtgattatgttattgtattttagattgggtgatagagtaagattttgatttataaaaatttattaattaattttttttaaattaaggaatgtttttagataggggttttttagtttaagttgt

SEQ ID NO: 180 - DNA, 3001 bp, homo sapiens
ttagtgttgtttttataaaataaataatttttttgtttgtttttttttttgagatggaattttgtttagttgtttaggttggagtgtagtggtgtgattttggttttttgtaattttggttttttgggtttaagtgatttttttgttttagttttttaagtagttgggattataggtatgtgttattattatgtttggttaatttttgtatttttagtagagatggggttttattatgttggttaggttgattttgaatttttgattttaggtgatttgtttgttttggttttttaaagtgttgggattataggtgtgagttattgtatttggtttaataaatgttttagaaagttatttggatgatagtttatgattgttgaatattggttgaggtttataaaattgtgtttattgtttggggattttttagttggtttttattttttatggaaagtggtttttttataaatttttatggtgggaattattgtaaaggtattggtttttttggtttagaatattttgtgggattttagttgtttttgggtttttttttttagtgtaattattaattttaatatgtaatgtgttttgtggtttaagtgtttgaatgaaggtttggggttaaagttatgtgtttgattgtgttatatgttttgttattttttttatgtttttttttttagtgtatattttggttgttattttgtgtgtgaggttatggaatttttgagttttgttaattttatggttgagtgttttagggattggttaattgtaatttagattttgtaggaaagttttgtttttatttgtatggaggtgggaattgttatgaagtttttgtggagggagaggaagtagttgtggaaagttaataagagtggggaattgatgatgttaattaatggggatgtggggatattatggttaatgagaatggagaaggtttaggatatgtgggtgggggaagttgagtgttgagattaagggttaaagttgggaggtgagtttgttattttgagttgggtgagtgttgtgggttaagtaggggttgtagggtagtaggagtgtaggtgatttggggttgggagttagtaataggtagggttgtgggttgggtagtgtggaggggtatttttttttagtgttgggagaggttatggtaatttagatatggttttattaatgaatgttaattattaatggtaatgaatgattgattgttttggttggggtgggttggggattgttgtgtaagatgggtaggattttgtgtgatatttgtttagtatttgtttttagtttttttgagagattatttttttttgtaatattttttttttggggtttgggtatatttttttgatttttgatttttatgattttgttttgaagatttattgttttgtttttttgatttttaatgttttttttagttggggtatggtgtaaggaagagtgtggtttagggaggatggatgggggtgaaggggatgattaaaggttgttattataagtaaataattagggttttagtgggattattattattattttttttttttttgtagattgaaaaaatgtagattgttggggtattatttatttttttagttttggtaaggtgttgtgttgtagtgttttgtagtattaggtgtatggtgtggatgttattagtgtttaatgaatgaatttaggggagtttggtgttttgatgatgtaggttttttgaggtggttgtaggatgtgatgaaggtaatttttgtttatttgggtttgtgaattaagttattttggttttggaatgtggttagagagtttggatttgatttttatttttagtttgttttggttatagagatagtttattaaaatagtggtttttaatagtggttgtatgttagaattatttagggaattttttaaaattttgatgtttaggttgtattttagattatttgtattagattttgggaatgggggtggaatttaggtatttgtattttttaagatttttttagatgattttattgtgtagttaagtttgagaattattgtattaaaaattattttaaaaaagttatgttatagatggttttttttggatggttattttagttggtttttggggttgattggtttattttatttagggtgtgtagttgtgagtgtattttagtagaataaaattttttttatttgattatttggtgatttgggtataaattttttttgtatttgttttggtattagtgtgggtttttgttttattttgagaagttgattaaagttgtgtttaaagaagtgaattttggtttggttttgaatggtgaaggttgttattgttgattatattaagttattgagatagttgtttttggggtaggtttatttgataggaataggaataaattgattttgaaatatattgaatttattttgtttatgaaatttgtagttatttttgatagtttagtaattaggattttttttttttgattgatttggtaggatgtggttttttgattttatagatttgttgttgtattaggggtttaattaggtttgtgtttgttttttttttgaatagtttagtgaatttatttaaataggtaagggaggaatagtttttttaggaatgtttttaaggtttaggatggtggtttatatttgtaattttagttttttgagaggttgaggtgagaggattatttgagtttagttgtttaagattagtttgggtaatatagtgaaattttatttttataaaaaaaataaaaaaattagttatgtgtggtggtatgtggttgtagttttagttattttagggttgagatgagaggattggttaattttagaggttgagattgttgtgattatgttattgtattttagattgggtgatagagtaagattttgatttataaaaatttattaattaattttttttaaattaaggaatgtttttagataggggttttttagtttaagttgt

SEQ ID NO: 181 - DNA, 50 bp, homo sapiens
tctttcttctttttttgaatgaaccgtgtgacgttacgcacaggaaaccg

SEQ ID NO: 182 - DNA, 50 bp, homo sapiens
ttttttttttttttttgaatgaatcgtgtgacgttacgtataggaaatcg

SEQ ID NO: 183 - DNA, 50 bp, homo sapiens
ttttttttttttttttgaatgaattgtgtgatgttatgtataggaaattg

SEQ ID NO: 184 - DNA, 50 bp, homo sapiens
cggttttttgtgcgtaacgttatacggtttatttaaaaaaagaagaaaga

SEQ ID NO: 185 - DNA, 50 bp, homo sapiens
tggttttttgtgtgtaatgttatatggtttatttaaaaaaagaagaaaga

SEQ ID NO: 186 - DNA, 3001 bp, homo sapiens
cagtgagctgagatcgcaccactgcacaccagcctccaagatacaacagagcaagactctgtctcaaaaaaaaaaaaaaagtcatagcatatttgtacacattgtagtactcatttgtcatctttcttgaccccaataatccagtgtccctatatatttgcactcgagccctattaagtaagccgctgtgcttctagaagacctttttcttttcttggtgctttgtcaaagactcttggagataaaaatacacacgtgcaacttgtttgtcctcttgtccttttttgctaggggctattcatgctgattaatttaaaactgtctgcttgcgcgtacacacgtctgcgagtgtgaatgtgtatgtgtgtatctatgtacctcatttgagaaagtgcggccaactaggattggctacgaggcaaaggtggagacctttaggagcccacccaccccagcgttaggacggtgggcctgaaagttactatatggaagtcctcatcgtgtagcactaaaccagtgtaaaaggtgttagggacagagggaaaacattgacttaaactgtcgtaaagcccttgataaaccccttccctggagcgctgagttctgcatggcctgggccacggactaggtgttcaggtggacacgggcggggatgcgcgtgcgtgtgtagtgcgcggacacctaggaagctacttgaaagtaaacaccacgctcggggcgtccctagacattgcttaaaacgtgcagagtcacctgtcttcacagcagggcagcgctgaggtcccactgctgggggcggtggggggcggcattggcctgggtcttcccccggcggccgagcgccggtaacacaacgtgtgtgtgtgtaggcgcgtgtacacactctcatacacggctagaaagggtccaggcgacacacacactcccacatacacggctagaaaaggtccaggcgagacacacacacacacacacacacacacacacactccacacacactcacacggccagaaagggtccaggcggttcccggcgcttttccagcccttgttttcatggcgcaccctcccgccagccgcccccctccgcactccgtcgtccgcccggcccggccgcgtgcggttccccgggagcccccaccccgtcgcggaccccagcgaccaccaagtccgcacgcggcctgccgcaggcctgagcagaaggccccgcgcacacccaccgcgccgcggccgcgcgggaggcctgtgccgcccgcgccacccactggccgggccccgcgggcgcagcggagcgggcgggtggccggcccggacgcgccctccccggccgcggccccgcgcgccatgtgcccccggcgggacgcgccactcccgggcctgccgcggcgcctttaacccgggccagggagcggggcggagggggcggtcgggtggctcagaggagggctctttctttcttctttttttgaatgaaccgtgtgacgttacgcacaggaaaccggtcgggctgtgcagagaatgaagtaagaggacaggcaccacagccccgctcccgcccccttcctcccgcgcccgcccctccgcgccgcctgcccgcccgcccgccgcgctcccgcccgccgctctccgtggccccgccgcgctgccgccgccgccgctgccagcgaaggtgccggggctccgggccctccctgccggcggccgtcagcgctcggagcgggctgcgcggcgggagctccgggaggcggccgtagccagcgccgccgcgcaggaccaggaggaggagaaagggtgcgcagcccggaggcggggtgcgccggtggggtgcagcggaagagggggtccaggggggagaacttcgtagcagtcatcctttttaggaaaagagggaaaaaataaaaccctcccccaccacctccttctccccacccctcgccgcaccacacacagcgcgggcttctagcgctcggcaccggcgggccaggcgcgtcctgccttcatttatccagcagcttttcggaaaatgcatttgctgttcggagtttaatcagaagaggattcctgcctccgtccccggctccttcatcgtcccctctcccctgtctctctcctggggaggcgtgaagcggtcccgtggatagagattcatgcctgtgcccgcgcgtgtgtgcgcgcgtgtaaattgccgagaaggggaaaacatcacaggacttctgcgaataccggactgaaaattgtaattcatctgccgccgccgctgccttttttttttctcgagctcttgagatctccggttgggattcctgcggattgacatttctgtgaagcagaagtctgggaatcgatctggaaatcctcctaatttttactccctctccccgcgactcctgattcattgggaagtttcaaatcagctataactggagagtgctgaagattgatgggatcgttgccttatgcatttgttttggttttacaaaaaggaaacttgacagaggatcatgctgtacttaaaaaatacaagtaagttctctgcacaggaaattggtttaatgtaactttcaatggaaacctttgagattttttacttaaagtgcattcgagtaaatttaatttccaggcagcttaatacattctttttagccgtgttacttgtagtgtgtatgccctgctttcactcagtgtgtacagggaaacgcacctgattttttacttattagtttgttttttctttaacctttcagcatcacagaggaagtagactgatattaacaatacttactaataataacgtgcctcatgaaataaagatccgaaaggaattggaataaaaatttcctgcatctcatgccaagggggaaacaccagaatcaagtgttccgcgtgattgaagacaccccctcgtccaagaatgcaaagcacatccaataaaatagctggattataactcctcttctttctctgggggccgtggggtgggagctggggcgagaggtgccgt

SEQ ID NO: 187 - DNA, 3001 bp, homo sapiens
tagtgagttgagatcgtattattgtatattagtttttaagatataatagagtaagattttgttttaaaaaaaaaaaaaaagttatagtatatttgtatatattgtagtatttatttgttattttttttgattttaataatttagtgtttttatatatttgtattcgagttttattaagtaagtcgttgtgtttttagaagatttttttttttttttggtgttttgttaaagatttttggagataaaaatatatacgtgtaatttgtttgtttttttgtttttttttgttaggggttatttatgttgattaatttaaaattgtttgtttgcgcgtatatacgtttgcgagtgtgaatgtgtatgtgtgtatttatgtattttatttgagaaagtgcggttaattaggattggttacgaggtaaaggtggagatttttaggagtttatttattttagcgttaggacggtgggtttgaaagttattatatggaagtttttatcgtgtagtattaaattagtgtaaaaggtgttagggatagagggaaaatattgatttaaattgtcgtaaagtttttgataaattttttttttggagcgttgagttttgtatggtttgggttacggattaggtgtttaggtggatacgggcggggatgcgcgtgcgtgtgtagtgcgcggatatttaggaagttatttgaaagtaaatattacgttcggggcgtttttagatattgtttaaaacgtgtagagttatttgtttttatagtagggtagcgttgaggttttattgttgggggcggtggggggcggtattggtttgggttttttttcggcggtcgagcgtcggtaatataacgtgtgtgtgtgtaggcgcgtgtatatatttttatatacggttagaaagggtttaggcgatatatatatttttatatatacggttagaaaaggtttaggcgagatatatatatatatatatatatatatatatattttatatatatttatacggttagaaagggtttaggcggttttcggcgtttttttagtttttgtttttatggcgtattttttcgttagtcgttttttttcgtatttcgtcgttcgttcggttcggtcgcgtgcggtttttcgggagtttttatttcgtcgcggattttagcgattattaagttcgtacgcggtttgtcgtaggtttgagtagaaggtttcgcgtatatttatcgcgtcgcggtcgcgcgggaggtttgtgtcgttcgcgttatttattggtcgggtttcgcgggcgtagcggagcgggcgggtggtcggttcggacgcgtttttttcggtcgcggtttcgcgcgttatgtgttttcggcgggacgcgttattttcgggtttgtcgcggcgtttttaattcgggttagggagcggggcggagggggcggtcgggtggtttagaggagggtttttttttttttttttttttgaatgaatcgtgtgacgttacgtataggaaatcggtcgggttgtgtagagaatgaagtaagaggataggtattatagtttcgttttcgttttttttttttcgcgttcgttttttcgcgtcgtttgttcgttcgttcgtcgcgttttcgttcgtcgtttttcgtggtttcgtcgcgttgtcgtcgtcgtcgttgttagcgaaggtgtcggggtttcgggttttttttgtcggcggtcgttagcgttcggagcgggttgcgcggcgggagtttcgggaggcggtcgtagttagcgtcgtcgcgtaggattaggaggaggagaaagggtgcgtagttcggaggcggggtgcgtcggtggggtgtagcggaagagggggtttaggggggagaatttcgtagtagttattttttttaggaaaagagggaaaaaataaaatttttttttattatttttttttttttatttttcgtcgtattatatatagcgcgggtttttagcgttcggtatcggcgggttaggcgcgttttgtttttatttatttagtagtttttcggaaaatgtatttgttgttcggagtttaattagaagaggatttttgttttcgttttcggtttttttatcgtttttttttttttgttttttttttggggaggcgtgaagcggtttcgtggatagagatttatgtttgtgttcgcgcgtgtgtgcgcgcgtgtaaattgtcgagaaggggaaaatattataggatttttgcgaatatcggattgaaaattgtaatttatttgtcgtcgtcgttgttttttttttttttcgagtttttgagattttcggttgggatttttgcggattgatatttttgtgaagtagaagtttgggaatcgatttggaaatttttttaatttttatttttttttttcgcgatttttgatttattgggaagttttaaattagttataattggagagtgttgaagattgatgggatcgttgttttatgtatttgttttggttttataaaaaggaaatttgatagaggattatgttgtatttaaaaaatataagtaagttttttgtataggaaattggtttaatgtaatttttaatggaaatttttgagattttttatttaaagtgtattcgagtaaatttaatttttaggtagtttaatatattttttttagtcgtgttatttgtagtgtgtatgttttgtttttatttagtgtgtatagggaaacgtatttgattttttatttattagtttgttttttttttaattttttagtattatagaggaagtagattgatattaataatatttattaataataacgtgttttatgaaataaagattcgaaaggaattggaataaaaattttttgtattttatgttaagggggaaatattagaattaagtgtttcgcgtgattgaagatattttttcgtttaagaatgtaaagtatatttaataaaatagttggattataattttttttttttttttgggggtcgtggggtgggagttggggcgagaggtgtcgt

SEQ ID NO: 188 - DNA, 3001 bp, homo sapiens
tagtgagttgagattgtattattgtatattagtttttaagatataatagagtaagattttgttttaaaaaaaaaaaaaaagttatagtatatttgtatatattgtagtatttatttgttattttttttgattttaataatttagtgtttttatatatttgtatttgagttttattaagtaagttgttgtgtttttagaagatttttttttttttttggtgttttgttaaagatttttggagataaaaatatatatgtgtaatttgtttgtttttttgtttttttttgttaggggttatttatgttgattaatttaaaattgtttgtttgtgtgtatatatgtttgtgagtgtgaatgtgtatgtgtgtatttatgtattttatttgagaaagtgtggttaattaggattggttatgaggtaaaggtggagatttttaggagtttatttattttagtgttaggatggtgggtttgaaagttattatatggaagtttttattgtgtagtattaaattagtgtaaaaggtgttagggatagagggaaaatattgatttaaattgttgtaaagtttttgataaattttttttttggagtgttgagttttgtatggtttgggttatggattaggtgtttaggtggatatgggtggggatgtgtgtgtgtgtgtagtgtgtggatatttaggaagttatttgaaagtaaatattatgtttggggtgtttttagatattgtttaaaatgtgtagagttatttgtttttatagtagggtagtgttgaggttttattgttgggggtggtggggggtggtattggtttgggtttttttttggtggttgagtgttggtaatataatgtgtgtgtgtgtaggtgtgtgtatatatttttatatatggttagaaagggtttaggtgatatatatatttttatatatatggttagaaaaggtttaggtgagatatatatatatatatatatatatatatatattttatatatatttatatggttagaaagggtttaggtggtttttggtgtttttttagtttttgtttttatggtgtatttttttgttagttgtttttttttgtattttgttgtttgtttggtttggttgtgtgtggttttttgggagtttttattttgttgtggattttagtgattattaagtttgtatgtggtttgttgtaggtttgagtagaaggttttgtgtatatttattgtgttgtggttgtgtgggaggtttgtgttgtttgtgttatttattggttgggttttgtgggtgtagtggagtgggtgggtggttggtttggatgtgttttttttggttgtggttttgtgtgttatgtgtttttggtgggatgtgttatttttgggtttgttgtggtgtttttaatttgggttagggagtggggtggagggggtggttgggtggtttagaggagggtttttttttttttttttttttgaatgaattgtgtgatgttatgtataggaaattggttgggttgtgtagagaatgaagtaagaggataggtattatagttttgtttttgtttttttttttttgtgtttgtttttttgtgttgtttgtttgtttgtttgttgtgtttttgtttgttgttttttgtggttttgttgtgttgttgttgttgttgttgttagtgaaggtgttggggttttgggttttttttgttggtggttgttagtgtttggagtgggttgtgtggtgggagttttgggaggtggttgtagttagtgttgttgtgtaggattaggaggaggagaaagggtgtgtagtttggaggtggggtgtgttggtggggtgtagtggaagagggggtttaggggggagaattttgtagtagttattttttttaggaaaagagggaaaaaataaaatttttttttattatttttttttttttattttttgttgtattatatatagtgtgggtttttagtgtttggtattggtgggttaggtgtgttttgtttttatttatttagtagttttttggaaaatgtatttgttgtttggagtttaattagaagaggatttttgtttttgtttttggtttttttattgtttttttttttttgttttttttttggggaggtgtgaagtggttttgtggatagagatttatgtttgtgtttgtgtgtgtgtgtgtgtgtgtaaattgttgagaaggggaaaatattataggatttttgtgaatattggattgaaaattgtaatttatttgttgttgttgttgtttttttttttttttgagtttttgagatttttggttgggatttttgtggattgatatttttgtgaagtagaagtttgggaattgatttggaaatttttttaatttttattttttttttttgtgatttttgatttattgggaagttttaaattagttataattggagagtgttgaagattgatgggattgttgttttatgtatttgttttggttttataaaaaggaaatttgatagaggattatgttgtatttaaaaaatataagtaagttttttgtataggaaattggtttaatgtaatttttaatggaaatttttgagattttttatttaaagtgtatttgagtaaatttaatttttaggtagtttaatatattttttttagttgtgttatttgtagtgtgtatgttttgtttttatttagtgtgtatagggaaatgtatttgattttttatttattagtttgttttttttttaattttttagtattatagaggaagtagattgatattaataatatttattaataataatgtgttttatgaaataaagatttgaaaggaattggaataaaaattttttgtattttatgttaagggggaaatattagaattaagtgttttgtgtgattgaagatatttttttgtttaagaatgtaaagtatatttaataaaatagttggattataattttttttttttttttgggggttgtggggtgggagttggggtgagaggtgttgt

SEQ ID NO: 189 - DNA, 3001 bp, homo sapiens
acggtatttttcgttttagtttttattttacggtttttagagaaagaagaggagttataatttagttattttattggatgtgttttgtatttttggacgagggggtgtttttaattacgcggaatatttgattttggtgttttttttttggtatgagatgtaggaaatttttattttaatttttttcggatttttattttatgaggtacgttattattagtaagtattgttaatattagtttattttttttgtgatgttgaaaggttaaagaaaaaataaattaataagtaaaaaattaggtgcgtttttttgtatatattgagtgaaagtagggtatatatattataagtaatacggttaaaaagaatgtattaagttgtttggaaattaaatttattcgaatgtattttaagtaaaaaattttaaaggtttttattgaaagttatattaaattaattttttgtgtagagaatttatttgtattttttaagtatagtatgattttttgttaagttttttttttgtaaaattaaaataaatgtataaggtaacgattttattaatttttagtattttttagttatagttgatttgaaattttttaatgaattaggagtcgcggggagagggagtaaaaattaggaggatttttagatcgatttttagatttttgttttatagaaatgttaattcgtaggaattttaatcggagattttaagagttcgagaaaaaaaaaaggtagcggcggcggtagatgaattataatttttagttcggtattcgtagaagttttgtgatgttttttttttttcggtaatttatacgcgcgtatatacgcgcgggtataggtatgaatttttatttacgggatcgttttacgtttttttaggagagagataggggagaggggacgatgaaggagtcggggacggaggtaggaatttttttttgattaaatttcgaatagtaaatgtatttttcgaaaagttgttggataaatgaaggtaggacgcgtttggttcgtcggtgtcgagcgttagaagttcgcgttgtgtgtggtgcggcgaggggtggggagaaggaggtggtgggggagggttttattttttttttttttttttaaaaaggatgattgttacgaagtttttttttttggattttttttttcgttgtattttatcggcgtatttcgttttcgggttgcgtatttttttttttttttttggttttgcgcggcggcgttggttacggtcgtttttcggagttttcgtcgcgtagttcgtttcgagcgttgacggtcgtcggtagggagggttcggagtttcggtattttcgttggtagcggcggcggcggtagcgcggcggggttacggagagcggcgggcgggagcgcggcgggcgggcgggtaggcggcgcggaggggcgggcgcgggaggaagggggcgggagcggggttgtggtgtttgtttttttattttattttttgtatagttcgatcggttttttgtgcgtaacgttatacggtttatttaaaaaaagaagaaagaaagagtttttttttgagttattcgatcgtttttttcgtttcgttttttggttcgggttaaaggcgtcgcggtaggttcgggagtggcgcgtttcgtcgggggtatatggcgcgcggggtcgcggtcggggagggcgcgttcgggtcggttattcgttcgtttcgttgcgttcgcggggttcggttagtgggtggcgcgggcggtataggtttttcgcgcggtcgcggcgcggtgggtgtgcgcggggttttttgtttaggtttgcggtaggtcgcgtgcggatttggtggtcgttggggttcgcgacggggtgggggttttcggggaatcgtacgcggtcgggtcgggcggacgacggagtgcggaggggggcggttggcgggagggtgcgttatgaaaataagggttggaaaagcgtcgggaatcgtttggattttttttggtcgtgtgagtgtgtgtggagtgtgtgtgtgtgtgtgtgtgtgtgtgtgtgtttcgtttggattttttttagtcgtgtatgtgggagtgtgtgtgtcgtttggattttttttagtcgtgtatgagagtgtgtatacgcgtttatatatatatacgttgtgttatcggcgttcggtcgtcgggggaagatttaggttaatgtcgttttttatcgtttttagtagtgggattttagcgttgttttgttgtgaagataggtgattttgtacgttttaagtaatgtttagggacgtttcgagcgtggtgtttatttttaagtagttttttaggtgttcgcgtattatatacgtacgcgtattttcgttcgtgtttatttgaatatttagttcgtggtttaggttatgtagaatttagcgttttagggaaggggtttattaagggttttacgatagtttaagttaatgttttttttttgtttttaatattttttatattggtttagtgttatacgatgaggatttttatatagtaatttttaggtttatcgttttaacgttggggtgggtgggtttttaaaggtttttatttttgtttcgtagttaattttagttggtcgtatttttttaaatgaggtatatagatatatatatatatatttatattcgtagacgtgtgtacgcgtaagtagatagttttaaattaattagtatgaatagtttttagtaaaaaaggataagaggataaataagttgtacgtgtgtatttttatttttaagagtttttgataaagtattaagaaaagaaaaaggttttttagaagtatagcggtttatttaatagggttcgagtgtaaatatatagggatattggattattggggttaagaaagatgataaatgagtattataatgtgtataaatatgttatgattttttttttttttttgagatagagttttgttttgttgtattttggaggttggtgtgtagtggtgcgattttagtttattg

SEQ ID NO: 190 - DNA, 3001 bp, homo sapiens
atggtattttttgttttagtttttattttatggtttttagagaaagaagaggagttataatttagttattttattggatgtgttttgtatttttggatgagggggtgtttttaattatgtggaatatttgattttggtgttttttttttggtatgagatgtaggaaatttttattttaattttttttggatttttattttatgaggtatgttattattagtaagtattgttaatattagtttattttttttgtgatgttgaaaggttaaagaaaaaataaattaataagtaaaaaattaggtgtgtttttttgtatatattgagtgaaagtagggtatatatattataagtaatatggttaaaaagaatgtattaagttgtttggaaattaaatttatttgaatgtattttaagtaaaaaattttaaaggtttttattgaaagttatattaaattaattttttgtgtagagaatttatttgtattttttaagtatagtatgattttttgttaagttttttttttgtaaaattaaaataaatgtataaggtaatgattttattaatttttagtattttttagttatagttgatttgaaattttttaatgaattaggagttgtggggagagggagtaaaaattaggaggatttttagattgatttttagatttttgttttatagaaatgttaatttgtaggaattttaattggagattttaagagtttgagaaaaaaaaaaggtagtggtggtggtagatgaattataatttttagtttggtatttgtagaagttttgtgatgtttttttttttttggtaatttatatgtgtgtatatatgtgtgggtataggtatgaatttttatttatgggattgttttatgtttttttaggagagagataggggagaggggatgatgaaggagttggggatggaggtaggaatttttttttgattaaattttgaatagtaaatgtattttttgaaaagttgttggataaatgaaggtaggatgtgtttggtttgttggtgttgagtgttagaagtttgtgttgtgtgtggtgtggtgaggggtggggagaaggaggtggtgggggagggttttattttttttttttttttttaaaaaggatgattgttatgaagtttttttttttggatttttttttttgttgtattttattggtgtattttgtttttgggttgtgtatttttttttttttttttggttttgtgtggtggtgttggttatggttgttttttggagtttttgttgtgtagtttgttttgagtgttgatggttgttggtagggagggtttggagttttggtatttttgttggtagtggtggtggtggtagtgtggtggggttatggagagtggtgggtgggagtgtggtgggtgggtgggtaggtggtgtggaggggtgggtgtgggaggaagggggtgggagtggggttgtggtgtttgtttttttattttattttttgtatagtttgattggttttttgtgtgtaatgttatatggtttatttaaaaaaagaagaaagaaagagtttttttttgagttatttgattgttttttttgttttgttttttggtttgggttaaaggtgttgtggtaggtttgggagtggtgtgttttgttgggggtatatggtgtgtggggttgtggttggggagggtgtgtttgggttggttatttgtttgttttgttgtgtttgtggggtttggttagtgggtggtgtgggtggtataggttttttgtgtggttgtggtgtggtgggtgtgtgtggggttttttgtttaggtttgtggtaggttgtgtgtggatttggtggttgttggggtttgtgatggggtgggggtttttggggaattgtatgtggttgggttgggtggatgatggagtgtggaggggggtggttggtgggagggtgtgttatgaaaataagggttggaaaagtgttgggaattgtttggattttttttggttgtgtgagtgtgtgtggagtgtgtgtgtgtgtgtgtgtgtgtgtgtgtgttttgtttggattttttttagttgtgtatgtgggagtgtgtgtgttgtttggattttttttagttgtgtatgagagtgtgtatatgtgtttatatatatatatgttgtgttattggtgtttggttgttgggggaagatttaggttaatgttgttttttattgtttttagtagtgggattttagtgttgttttgttgtgaagataggtgattttgtatgttttaagtaatgtttagggatgttttgagtgtggtgtttatttttaagtagttttttaggtgtttgtgtattatatatgtatgtgtatttttgtttgtgtttatttgaatatttagtttgtggtttaggttatgtagaatttagtgttttagggaaggggtttattaagggttttatgatagtttaagttaatgttttttttttgtttttaatattttttatattggtttagtgttatatgatgaggatttttatatagtaatttttaggtttattgttttaatgttggggtgggtgggtttttaaaggtttttatttttgttttgtagttaattttagttggttgtatttttttaaatgaggtatatagatatatatatatatatttatatttgtagatgtgtgtatgtgtaagtagatagttttaaattaattagtatgaatagtttttagtaaaaaaggataagaggataaataagttgtatgtgtgtatttttatttttaagagtttttgataaagtattaagaaaagaaaaaggttttttagaagtatagtggtttatttaatagggtttgagtgtaaatatatagggatattggattattggggttaagaaagatgataaatgagtattataatgtgtataaatatgttatgattttttttttttttttgagatagagttttgttttgttgtattttggaggttggtgtgtagtggtgtgattttagtttattg

SEQ ID NO: 191 - DNA, 50 bp, homo sapiens
atcacaggacttctgcgaataccggactgaaaattgtaattcatctgccg

SEQ ID NO: 192 - DNA, 50 bp, homo sapiens
attataggatttttgcgaatatcggattgaaaattgtaatttatttgtcg

SEQ ID NO: 193 - DNA, 50 bp, homo sapiens
attataggatttttgtgaatattggattgaaaattgtaatttatttgttg

SEQ ID NO: 194 - DNA, 50 bp, homo sapiens
cggtagatgaattataatttttagttcggtattcgtagaagttttgtgat

SEQ ID NO: 195 - DNA, 50 bp, homo sapiens
tggtagatgaattataatttttagtttggtatttgtagaagttttgtgat

SEQ ID NO: 196 - DNA, 3001 bp, homo sapiens
cacctgtcttcacagcagggcagcgctgaggtcccactgctgggggcggtggggggcggcattggcctgggtcttcccccggcggccgagcgccggtaacacaacgtgtgtgtgtgtaggcgcgtgtacacactctcatacacggctagaaagggtccaggcgacacacacactcccacatacacggctagaaaaggtccaggcgagacacacacacacacacacacacacacacacactccacacacactcacacggccagaaagggtccaggcggttcccggcgcttttccagcccttgttttcatggcgcaccctcccgccagccgcccccctccgcactccgtcgtccgcccggcccggccgcgtgcggttccccgggagcccccaccccgtcgcggaccccagcgaccaccaagtccgcacgcggcctgccgcaggcctgagcagaaggccccgcgcacacccaccgcgccgcggccgcgcgggaggcctgtgccgcccgcgccacccactggccgggccccgcgggcgcagcggagcgggcgggtggccggcccggacgcgccctccccggccgcggccccgcgcgccatgtgcccccggcgggacgcgccactcccgggcctgccgcggcgcctttaacccgggccagggagcggggcggagggggcggtcgggtggctcagaggagggctctttctttcttctttttttgaatgaaccgtgtgacgttacgcacaggaaaccggtcgggctgtgcagagaatgaagtaagaggacaggcaccacagccccgctcccgcccccttcctcccgcgcccgcccctccgcgccgcctgcccgcccgcccgccgcgctcccgcccgccgctctccgtggccccgccgcgctgccgccgccgccgctgccagcgaaggtgccggggctccgggccctccctgccggcggccgtcagcgctcggagcgggctgcgcggcgggagctccgggaggcggccgtagccagcgccgccgcgcaggaccaggaggaggagaaagggtgcgcagcccggaggcggggtgcgccggtggggtgcagcggaagagggggtccaggggggagaacttcgtagcagtcatcctttttaggaaaagagggaaaaaataaaaccctcccccaccacctccttctccccacccctcgccgcaccacacacagcgcgggcttctagcgctcggcaccggcgggccaggcgcgtcctgccttcatttatccagcagcttttcggaaaatgcatttgctgttcggagtttaatcagaagaggattcctgcctccgtccccggctccttcatcgtcccctctcccctgtctctctcctggggaggcgtgaagcggtcccgtggatagagattcatgcctgtgcccgcgcgtgtgtgcgcgcgtgtaaattgccgagaaggggaaaacatcacaggacttctgcgaataccggactgaaaattgtaattcatctgccgccgccgctgccttttttttttctcgagctcttgagatctccggttgggattcctgcggattgacatttctgtgaagcagaagtctgggaatcgatctggaaatcctcctaatttttactccctctccccgcgactcctgattcattgggaagtttcaaatcagctataactggagagtgctgaagattgatgggatcgttgccttatgcatttgttttggttttacaaaaaggaaacttgacagaggatcatgctgtacttaaaaaatacaagtaagttctctgcacaggaaattggtttaatgtaactttcaatggaaacctttgagattttttacttaaagtgcattcgagtaaatttaatttccaggcagcttaatacattctttttagccgtgttacttgtagtgtgtatgccctgctttcactcagtgtgtacagggaaacgcacctgattttttacttattagtttgttttttctttaacctttcagcatcacagaggaagtagactgatattaacaatacttactaataataacgtgcctcatgaaataaagatccgaaaggaattggaataaaaatttcctgcatctcatgccaagggggaaacaccagaatcaagtgttccgcgtgattgaagacaccccctcgtccaagaatgcaaagcacatccaataaaatagctggattataactcctcttctttctctgggggccgtggggtgggagctggggcgagaggtgccgttggcccccgttgcttttcctctgggaaggatggcgcacgctgggagaacagggtacgataaccgggagatagtgatgaagtacatccattataagctgtcgcagaggggctacgagtgggatgcgggagatgtgggcgccgcgcccccgggggccgcccccgcaccgggcatcttctcctcccagcccgggcacacgccccatccagccgcatcccgggacccggtcgccaggacctcgccgctgcagaccccggctgcccccggcgccgccgcggggcctgcgctcagcccggtgccacctgtggtccacctgaccctccgccaggccggcgacgacttctcccgccgctaccgccgcgacttcgccgagatgtccagccagctgcacctgacgcccttcaccgcgcggggacgctttgccacggtggtggaggagctcttcagggacggggtgaactgggggaggattgtggccttctttgagttcggtggggtcatgtgtgtggagagcgtcaaccgggagatgtcgcccctggtggacaacatcgccctgtggatgactgagtacctgaaccggcacctgcacacctggatccaggataacggaggctgggtaggtgcacttggtgatgtgagtctgggctgaggccacaggtccgagatgcgggggttggagtgcgggtgggctcctggggcaatgggaggctgtggagccggcgaaataaaatcagagttgttgcttcccggcg

SEQ ID NO: 197 - DNA, 3001 bp, homo sapiens
tatttgtttttatagtagggtagcgttgaggttttattgttgggggcggtggggggcggtattggtttgggttttttttcggcggtcgagcgtcggtaatataacgtgtgtgtgtgtaggcgcgtgtatatatttttatatacggttagaaagggtttaggcgatatatatatttttatatatacggttagaaaaggtttaggcgagatatatatatatatatatatatatatatatattttatatatatttatacggttagaaagggtttaggcggttttcggcgtttttttagtttttgtttttatggcgtattttttcgttagtcgttttttttcgtatttcgtcgttcgttcggttcggtcgcgtgcggtttttcgggagtttttatttcgtcgcggattttagcgattattaagttcgtacgcggtttgtcgtaggtttgagtagaaggtttcgcgtatatttatcgcgtcgcggtcgcgcgggaggtttgtgtcgttcgcgttatttattggtcgggtttcgcgggcgtagcggagcgggcgggtggtcggttcggacgcgtttttttcggtcgcggtttcgcgcgttatgtgttttcggcgggacgcgttattttcgggtttgtcgcggcgtttttaattcgggttagggagcggggcggagggggcggtcgggtggtttagaggagggtttttttttttttttttttttgaatgaatcgtgtgacgttacgtataggaaatcggtcgggttgtgtagagaatgaagtaagaggataggtattatagtttcgttttcgttttttttttttcgcgttcgttttttcgcgtcgtttgttcgttcgttcgtcgcgttttcgttcgtcgtttttcgtggtttcgtcgcgttgtcgtcgtcgtcgttgttagcgaaggtgtcggggtttcgggttttttttgtcggcggtcgttagcgttcggagcgggttgcgcggcgggagtttcgggaggcggtcgtagttagcgtcgtcgcgtaggattaggaggaggagaaagggtgcgtagttcggaggcggggtgcgtcggtggggtgtagcggaagagggggtttaggggggagaatttcgtagtagttattttttttaggaaaagagggaaaaaataaaatttttttttattatttttttttttttatttttcgtcgtattatatatagcgcgggtttttagcgttcggtatcggcgggttaggcgcgttttgtttttatttatttagtagtttttcggaaaatgtatttgttgttcggagtttaattagaagaggatttttgttttcgttttcggtttttttatcgtttttttttttttgttttttttttggggaggcgtgaagcggtttcgtggatagagatttatgtttgtgttcgcgcgtgtgtgcgcgcgtgtaaattgtcgagaaggggaaaatattataggatttttgcgaatatcggattgaaaattgtaatttatttgtcgtcgtcgttgttttttttttttttcgagtttttgagattttcggttgggatttttgcggattgatatttttgtgaagtagaagtttgggaatcgatttggaaatttttttaatttttatttttttttttcgcgatttttgatttattgggaagttttaaattagttataattggagagtgttgaagattgatgggatcgttgttttatgtatttgttttggttttataaaaaggaaatttgatagaggattatgttgtatttaaaaaatataagtaagttttttgtataggaaattggtttaatgtaatttttaatggaaatttttgagattttttatttaaagtgtattcgagtaaatttaatttttaggtagtttaatatattttttttagtcgtgttatttgtagtgtgtatgttttgtttttatttagtgtgtatagggaaacgtatttgattttttatttattagtttgttttttttttaattttttagtattatagaggaagtagattgatattaataatatttattaataataacgtgttttatgaaataaagattcgaaaggaattggaataaaaattttttgtattttatgttaagggggaaatattagaattaagtgtttcgcgtgattgaagatattttttcgtttaagaatgtaaagtatatttaataaaatagttggattataattttttttttttttttgggggtcgtggggtgggagttggggcgagaggtgtcgttggttttcgttgttttttttttgggaaggatggcgtacgttgggagaatagggtacgataatcgggagatagtgatgaagtatatttattataagttgtcgtagaggggttacgagtgggatgcgggagatgtgggcgtcgcgttttcgggggtcgttttcgtatcgggtattttttttttttagttcgggtatacgttttatttagtcgtatttcgggattcggtcgttaggatttcgtcgttgtagatttcggttgttttcggcgtcgtcgcggggtttgcgtttagttcggtgttatttgtggtttatttgatttttcgttaggtcggcgacgatttttttcgtcgttatcgtcgcgatttcgtcgagatgtttagttagttgtatttgacgttttttatcgcgcggggacgttttgttacggtggtggaggagttttttagggacggggtgaattgggggaggattgtggttttttttgagttcggtggggttatgtgtgtggagagcgttaatcgggagatgtcgtttttggtggataatatcgttttgtggatgattgagtatttgaatcggtatttgtatatttggatttaggataacggaggttgggtaggtgtatttggtgatgtgagtttgggttgaggttataggttcgagatgcgggggttggagtgcgggtgggtttttggggtaatgggaggttgtggagtcggcgaaataaaattagagttgttgtttttcggcg

SEQ ID NO: 198 - DNA, 3001 bp, homo sapiens
tatttgtttttatagtagggtagtgttgaggttttattgttgggggtggtggggggtggtattggtttgggtttttttttggtggttgagtgttggtaatataatgtgtgtgtgtgtaggtgtgtgtatatatttttatatatggttagaaagggtttaggtgatatatatatttttatatatatggttagaaaaggtttaggtgagatatatatatatatatatatatatatatatattttatatatatttatatggttagaaagggtttaggtggtttttggtgtttttttagtttttgtttttatggtgtatttttttgttagttgtttttttttgtattttgttgtttgtttggtttggttgtgtgtggttttttgggagtttttattttgttgtggattttagtgattattaagtttgtatgtggtttgttgtaggtttgagtagaaggttttgtgtatatttattgtgttgtggttgtgtgggaggtttgtgttgtttgtgttatttattggttgggttttgtgggtgtagtggagtgggtgggtggttggtttggatgtgttttttttggttgtggttttgtgtgttatgtgtttttggtgggatgtgttatttttgggtttgttgtggtgtttttaatttgggttagggagtggggtggagggggtggttgggtggtttagaggagggtttttttttttttttttttttgaatgaattgtgtgatgttatgtataggaaattggttgggttgtgtagagaatgaagtaagaggataggtattatagttttgtttttgtttttttttttttgtgtttgtttttttgtgttgtttgtttgtttgtttgttgtgtttttgtttgttgttttttgtggttttgttgtgttgttgttgttgttgttgttagtgaaggtgttggggttttgggttttttttgttggtggttgttagtgtttggagtgggttgtgtggtgggagttttgggaggtggttgtagttagtgttgttgtgtaggattaggaggaggagaaagggtgtgtagtttggaggtggggtgtgttggtggggtgtagtggaagagggggtttaggggggagaattttgtagtagttattttttttaggaaaagagggaaaaaataaaatttttttttattatttttttttttttattttttgttgtattatatatagtgtgggtttttagtgtttggtattggtgggttaggtgtgttttgtttttatttatttagtagttttttggaaaatgtatttgttgtttggagtttaattagaagaggatttttgtttttgtttttggtttttttattgtttttttttttttgttttttttttggggaggtgtgaagtggttttgtggatagagatttatgtttgtgtttgtgtgtgtgtgtgtgtgtgtaaattgttgagaaggggaaaatattataggatttttgtgaatattggattgaaaattgtaatttatttgttgttgttgttgtttttttttttttttgagtttttgagatttttggttgggatttttgtggattgatatttttgtgaagtagaagtttgggaattgatttggaaatttttttaatttttattttttttttttgtgatttttgatttattgggaagttttaaattagttataattggagagtgttgaagattgatgggattgttgttttatgtatttgttttggttttataaaaaggaaatttgatagaggattatgttgtatttaaaaaatataagtaagttttttgtataggaaattggtttaatgtaatttttaatggaaatttttgagattttttatttaaagtgtatttgagtaaatttaatttttaggtagtttaatatattttttttagttgtgttatttgtagtgtgtatgttttgtttttatttagtgtgtatagggaaatgtatttgattttttatttattagtttgttttttttttaattttttagtattatagaggaagtagattgatattaataatatttattaataataatgtgttttatgaaataaagatttgaaaggaattggaataaaaattttttgtattttatgttaagggggaaatattagaattaagtgttttgtgtgattgaagatatttttttgtttaagaatgtaaagtatatttaataaaatagttggattataattttttttttttttttgggggttgtggggtgggagttggggtgagaggtgttgttggtttttgttgttttttttttgggaaggatggtgtatgttgggagaatagggtatgataattgggagatagtgatgaagtatatttattataagttgttgtagaggggttatgagtgggatgtgggagatgtgggtgttgtgtttttgggggttgtttttgtattgggtattttttttttttagtttgggtatatgttttatttagttgtattttgggatttggttgttaggattttgttgttgtagattttggttgtttttggtgttgttgtggggtttgtgtttagtttggtgttatttgtggtttatttgattttttgttaggttggtgatgattttttttgttgttattgttgtgattttgttgagatgtttagttagttgtatttgatgttttttattgtgtggggatgttttgttatggtggtggaggagttttttagggatggggtgaattgggggaggattgtggttttttttgagtttggtggggttatgtgtgtggagagtgttaattgggagatgttgtttttggtggataatattgttttgtggatgattgagtatttgaattggtatttgtatatttggatttaggataatggaggttgggtaggtgtatttggtgatgtgagtttgggttgaggttataggtttgagatgtgggggttggagtgtgggtgggtttttggggtaatgggaggttgtggagttggtgaaataaaattagagttgttgttttttggtg

SEQ ID NO: 199 - DNA, 3001 bp, homo sapiens
cgtcgggaagtaataattttgattttatttcgtcggttttatagttttttattgttttaggagtttattcgtattttaattttcgtatttcggatttgtggttttagtttagatttatattattaagtgtatttatttagttttcgttattttggatttaggtgtgtaggtgtcggtttaggtatttagttatttatagggcgatgttgtttattaggggcgatatttttcggttgacgttttttatatatatgattttatcgaatttaaagaaggttataatttttttttagtttatttcgtttttgaagagtttttttattatcgtggtaaagcgttttcgcgcggtgaagggcgttaggtgtagttggttggatatttcggcgaagtcgcggcggtagcggcgggagaagtcgtcgtcggtttggcggagggttaggtggattataggtggtatcgggttgagcgtaggtttcgcggcggcgtcgggggtagtcggggtttgtagcggcgaggttttggcgatcgggtttcgggatgcggttggatggggcgtgtgttcgggttgggaggagaagatgttcggtgcgggggcggttttcgggggcgcggcgtttatatttttcgtattttattcgtagtttttttgcgatagtttataatggatgtattttattattatttttcggttatcgtattttgtttttttagcgtgcgttattttttttagaggaaaagtaacgggggttaacggtatttttcgttttagtttttattttacggtttttagagaaagaagaggagttataatttagttattttattggatgtgttttgtatttttggacgagggggtgtttttaattacgcggaatatttgattttggtgttttttttttggtatgagatgtaggaaatttttattttaatttttttcggatttttattttatgaggtacgttattattagtaagtattgttaatattagtttattttttttgtgatgttgaaaggttaaagaaaaaataaattaataagtaaaaaattaggtgcgtttttttgtatatattgagtgaaagtagggtatatatattataagtaatacggttaaaaagaatgtattaagttgtttggaaattaaatttattcgaatgtattttaagtaaaaaattttaaaggtttttattgaaagttatattaaattaattttttgtgtagagaatttatttgtattttttaagtatagtatgattttttgttaagttttttttttgtaaaattaaaataaatgtataaggtaacgattttattaatttttagtattttttagttatagttgatttgaaattttttaatgaattaggagtcgcggggagagggagtaaaaattaggaggatttttagatcgatttttagatttttgttttatagaaatgttaattcgtaggaattttaatcggagattttaagagttcgagaaaaaaaaaaggtagcggcggcggtagatgaattataatttttagttcggtattcgtagaagttttgtgatgttttttttttttcggtaatttatacgcgcgtatatacgcgcgggtataggtatgaatttttatttacgggatcgttttacgtttttttaggagagagataggggagaggggacgatgaaggagtcggggacggaggtaggaatttttttttgattaaatttcgaatagtaaatgtatttttcgaaaagttgttggataaatgaaggtaggacgcgtttggttcgtcggtgtcgagcgttagaagttcgcgttgtgtgtggtgcggcgaggggtggggagaaggaggtggtgggggagggttttattttttttttttttttttaaaaaggatgattgttacgaagtttttttttttggattttttttttcgttgtattttatcggcgtatttcgttttcgggttgcgtatttttttttttttttttggttttgcgcggcggcgttggttacggtcgtttttcggagttttcgtcgcgtagttcgtttcgagcgttgacggtcgtcggtagggagggttcggagtttcggtattttcgttggtagcggcggcggcggtagcgcggcggggttacggagagcggcgggcgggagcgcggcgggcgggcgggtaggcggcgcggaggggcgggcgcgggaggaagggggcgggagcggggttgtggtgtttgtttttttattttattttttgtatagttcgatcggttttttgtgcgtaacgttatacggtttatttaaaaaaagaagaaagaaagagtttttttttgagttattcgatcgtttttttcgtttcgttttttggttcgggttaaaggcgtcgcggtaggttcgggagtggcgcgtttcgtcgggggtatatggcgcgcggggtcgcggtcggggagggcgcgttcgggtcggttattcgttcgtttcgttgcgttcgcggggttcggttagtgggtggcgcgggcggtataggtttttcgcgcggtcgcggcgcggtgggtgtgcgcggggttttttgtttaggtttgcggtaggtcgcgtgcggatttggtggtcgttggggttcgcgacggggtgggggttttcggggaatcgtacgcggtcgggtcgggcggacgacggagtgcggaggggggcggttggcgggagggtgcgttatgaaaataagggttggaaaagcgtcgggaatcgtttggattttttttggtcgtgtgagtgtgtgtggagtgtgtgtgtgtgtgtgtgtgtgtgtgtgtgtttcgtttggattttttttagtcgtgtatgtgggagtgtgtgtgtcgtttggattttttttagtcgtgtatgagagtgtgtatacgcgtttatatatatatacgttgtgttatcggcgttcggtcgtcgggggaagatttaggttaatgtcgttttttatcgtttttagtagtgggattttagcgttgttttgttgtgaagataggtg

SEQ ID NO: 200 - DNA, 3001 bp, homo sapiens
tgttgggaagtaataattttgattttattttgttggttttatagttttttattgttttaggagtttatttgtattttaatttttgtattttggatttgtggttttagtttagatttatattattaagtgtatttatttagtttttgttattttggatttaggtgtgtaggtgttggtttaggtatttagttatttatagggtgatgttgtttattaggggtgatattttttggttgatgttttttatatatatgattttattgaatttaaagaaggttataatttttttttagtttattttgtttttgaagagtttttttattattgtggtaaagtgtttttgtgtggtgaagggtgttaggtgtagttggttggatattttggtgaagttgtggtggtagtggtgggagaagttgttgttggtttggtggagggttaggtggattataggtggtattgggttgagtgtaggttttgtggtggtgttgggggtagttggggtttgtagtggtgaggttttggtgattgggttttgggatgtggttggatggggtgtgtgtttgggttgggaggagaagatgtttggtgtgggggtggtttttgggggtgtggtgtttatattttttgtattttatttgtagtttttttgtgatagtttataatggatgtattttattattattttttggttattgtattttgtttttttagtgtgtgttattttttttagaggaaaagtaatgggggttaatggtattttttgttttagtttttattttatggtttttagagaaagaagaggagttataatttagttattttattggatgtgttttgtatttttggatgagggggtgtttttaattatgtggaatatttgattttggtgttttttttttggtatgagatgtaggaaatttttattttaattttttttggatttttattttatgaggtatgttattattagtaagtattgttaatattagtttattttttttgtgatgttgaaaggttaaagaaaaaataaattaataagtaaaaaattaggtgtgtttttttgtatatattgagtgaaagtagggtatatatattataagtaatatggttaaaaagaatgtattaagttgtttggaaattaaatttatttgaatgtattttaagtaaaaaattttaaaggtttttattgaaagttatattaaattaattttttgtgtagagaatttatttgtattttttaagtatagtatgattttttgttaagttttttttttgtaaaattaaaataaatgtataaggtaatgattttattaatttttagtattttttagttatagttgatttgaaattttttaatgaattaggagttgtggggagagggagtaaaaattaggaggatttttagattgatttttagatttttgttttatagaaatgttaatttgtaggaattttaattggagattttaagagtttgagaaaaaaaaaaggtagtggtggtggtagatgaattataatttttagtttggtatttgtagaagttttgtgatgtttttttttttttggtaatttatatgtgtgtatatatgtgtgggtataggtatgaatttttatttatgggattgttttatgtttttttaggagagagataggggagaggggatgatgaaggagttggggatggaggtaggaatttttttttgattaaattttgaatagtaaatgtattttttgaaaagttgttggataaatgaaggtaggatgtgtttggtttgttggtgttgagtgttagaagtttgtgttgtgtgtggtgtggtgaggggtggggagaaggaggtggtgggggagggttttattttttttttttttttttaaaaaggatgattgttatgaagtttttttttttggatttttttttttgttgtattttattggtgtattttgtttttgggttgtgtatttttttttttttttttggttttgtgtggtggtgttggttatggttgttttttggagtttttgttgtgtagtttgttttgagtgttgatggttgttggtagggagggtttggagttttggtatttttgttggtagtggtggtggtggtagtgtggtggggttatggagagtggtgggtgggagtgtggtgggtgggtgggtaggtggtgtggaggggtgggtgtgggaggaagggggtgggagtggggttgtggtgtttgtttttttattttattttttgtatagtttgattggttttttgtgtgtaatgttatatggtttatttaaaaaaagaagaaagaaagagtttttttttgagttatttgattgttttttttgttttgttttttggtttgggttaaaggtgttgtggtaggtttgggagtggtgtgttttgttgggggtatatggtgtgtggggttgtggttggggagggtgtgtttgggttggttatttgtttgttttgttgtgtttgtggggtttggttagtgggtggtgtgggtggtataggttttttgtgtggttgtggtgtggtgggtgtgtgtggggttttttgtttaggtttgtggtaggttgtgtgtggatttggtggttgttggggtttgtgatggggtgggggtttttggggaattgtatgtggttgggttgggtggatgatggagtgtggaggggggtggttggtgggagggtgtgttatgaaaataagggttggaaaagtgttgggaattgtttggattttttttggttgtgtgagtgtgtgtggagtgtgtgtgtgtgtgtgtgtgtgtgtgtgtgttttgtttggattttttttagttgtgtatgtgggagtgtgtgtgttgtttggattttttttagttgtgtatgagagtgtgtatatgtgtttatatatatatatgttgtgttattggtgtttggttgttgggggaagatttaggttaatgttgttttttattgtttttagtagtgggattttagtgttgttttgttgtgaagataggtg

SEQ ID NO: 201 - DNA, 50 bp, homo sapiens
agcggaaggcgggtcaggcagaatgcggccccgggcgcgtgtggatgacg

SEQ ID NO: 202 - DNA, 50 bp, homo sapiens
agcggaaggcgggttaggtagaatgcggtttcgggcgcgtgtggatgacg

SEQ ID NO: 203 - DNA, 50 bp, homo sapiens
agtggaaggtgggttaggtagaatgtggttttgggtgtgtgtggatgatg

SEQ ID NO: 204 - DNA, 50 bp, homo sapiens
cgttatttatacgcgttcggggtcgtattttgtttgattcgtttttcgtt

SEQ ID NO: 205 - DNA, 50 bp, homo sapiens
tgttatttatatgtgtttggggttgtattttgtttgatttgttttttgtt

SEQ ID NO: 206 - DNA, 3001 bp, homo sapiens
taaactcatctccaagtctgtcacatctacctcagaattattcctgaaatttgtccatttctatcatttcttacctgctcattgcaaaagcaactcttctctttgcatccttttaaattgtttctcaaaagtttcatgtatacacagcagctagcagggtgatgttataaaactagatcctgtcacttacgtgttgataactcttcactagtttccccttacacttcgaataaactcgtattcctcacaggaacccagagagtctgtgcatgatggggactctccttgccttcttgatctcatcctctgttcttcccatgacctactttctcactttctccaaggcaccacattctgccccttccctattgcttgctcacatgtagattcttctcttggctgttctttccttagctctccacagagttggctgcttctcagtttactgaacctcttcagagggcactttcttgacatctcaaatcaaaaggtcacctgtcttcctttaatttctcagcaacttattttccttctacttttttttttttttttgagatggagtctcgctgtcgcccaggttggagtgcagtggcgcgatctcggctcactgcaggctccgccccccggggttcccgccattctcctgcctcagcctcccgagtagctgggactacaggcgcccaccacctcgcccggctaattttttgtatttttagtagagacggggtttcaccgtgttagccaggatggtctcgatctcctgactttgtgatccgcctgcctcggcctcccaaagtgctgggattacaagcgtgagccaccgcgcccggcctttccttctacatttaatgtttgctttctcaactagaaagtaatccccatgagggaaggcacagcgtctgtcttgttcctggttgtttccccagcttttgttaagggtgcttgcctggcacacaggaggaccttaaattgtggtggaattaatatgtgaacaatagtcacatgcagcagaggtgagactaggctaaggaataaaattgcacatctgtatttcagtaactttttttaaattttatttgaaacagggtcttgctctgtggctcagggtggagtgtagtggcacgttcatagctcattgcagcctcgaactcctggacctaagcaatcctcctgcctcagcctccatagtagctggaccacaggtgcacgccaccacactcggctaattttttaatttttttgtagagacggggcctccccaggttgcccaggctggtgatttttttcttaagcttcataaagattttgcaattaggaatactagggtaccagggcaactctacaagccctagccagccaagctgctcgcgccctcctatgaccgcggcagctccgcgcctgcgcagatctcccccgggcggtctcgccctctcatcctaagggggcgggcctagcggaaggcgggtcaggcagaatgcggccccgggcgcgtgtggatgacgtcacccggcgcgtgccggggtagcccgtagtaaccccgagtctgcggaagtggtgacccgtgggacgcggctgagacaggtaacctgttcgctccctgttgggtccctgccttcctctcctccggcgtcgggatggcggcggggacagcatcattccgttctgaaggcgacggggaaccctcccttaccctcacttttgctcgaccagcgaggacccgcatcccctcctcagttctcccagactcctggggctgaaacccatcctggggactgggcggagcggtcacatcttaccacctcagctgtagaggtggccacgggctctggctgtcttctccccggcggcacagacctttctcagcctctgggtgcctcctccttcgtctcttgcctccaggccctcggtcacctgccggtctcggcttctagccccacagggctcatctccagtcttaagtaggcagaacagtttcgattcgattcatttccacttgcagtgaaacccatccgcctcttcttcccccggaggatctttactgagagcaccacattttgagttttggggtccctatagaacattcatactgttagtctggagttttgttcatgaacgcatgcatgggcggggagggggtggcacagtaatgtgattatgattatctattgtgataataaaatatccacttaggatccaatccactgttgagatgcatggaacagttaatagcattgcataaaatgccccttgtacctgatttctttttggttttcgtgcaatgatgacaattacccttgcaaaggtagccctcaaaataagtaacataacccgctagggatgtttagatcgcaaaaaaacaacaataaggttcatatggttgataaagaaataatatgggttattacaaaaccagacagaatagatgctgagtatatgggacgagaagcagaattctgaaatccttgatctcattgattgtttggttttgtatttttaaaatacttttagtctgttccatttttgaatagtgtatattgtgcttcgtataagtctgggaagccttccaatgacttgctaattgggaagattagattcttccaatatttgggggacaaagtagaataaggttagggtataataatagttgcttactgttggcccatctgctttatcccaggtactgtgttcaacactttgcatatgttttctccttacttcatacaaccacctcgtgagttaggaattattacccccaatttatagagaaggaaattgagtttcggttatatgaaattgacttgctaaaaattcacagttaactaaatggcaaaatcaagatttaaattcaggtctgaatataacttcaaagcctgcacttttcttaaaggactctactaatgctcaaattttaggctttttacaatagttgcacacaattttatgagtttgttcacctacacaaatgatttaacactttttaatatctttaatactgtgttaa

SEQ ID NO: 207 - DNA, 3001 bp, homo sapiens
taaatttatttttaagtttgttatatttattttagaattatttttgaaatttgtttatttttattattttttatttgtttattgtaaaagtaatttttttttttgtatttttttaaattgttttttaaaagttttatgtatatatagtagttagtagggtgatgttataaaattagattttgttatttacgtgttgataattttttattagtttttttttatatttcgaataaattcgtattttttataggaatttagagagtttgtgtatgatggggattttttttgtttttttgattttattttttgttttttttatgatttatttttttattttttttaaggtattatattttgttttttttttattgtttgtttatatgtagattttttttttggttgttttttttttagttttttatagagttggttgttttttagtttattgaatttttttagagggtatttttttgatattttaaattaaaaggttatttgtttttttttaattttttagtaatttattttttttttatttttttttttttttttgagatggagtttcgttgtcgtttaggttggagtgtagtggcgcgatttcggtttattgtaggtttcgtttttcggggttttcgttatttttttgttttagtttttcgagtagttgggattataggcgtttattatttcgttcggttaattttttgtatttttagtagagacggggttttatcgtgttagttaggatggtttcgattttttgattttgtgattcgtttgtttcggttttttaaagtgttgggattataagcgtgagttatcgcgttcggtttttttttttatatttaatgtttgtttttttaattagaaagtaatttttatgagggaaggtatagcgtttgttttgtttttggttgtttttttagtttttgttaagggtgtttgtttggtatataggaggattttaaattgtggtggaattaatatgtgaataatagttatatgtagtagaggtgagattaggttaaggaataaaattgtatatttgtattttagtaattttttttaaattttatttgaaatagggttttgttttgtggtttagggtggagtgtagtggtacgtttatagtttattgtagtttcgaatttttggatttaagtaatttttttgttttagtttttatagtagttggattataggtgtacgttattatattcggttaattttttaatttttttgtagagacggggtttttttaggttgtttaggttggtgattttttttttaagttttataaagattttgtaattaggaatattagggtattagggtaattttataagttttagttagttaagttgttcgcgtttttttatgatcgcggtagtttcgcgtttgcgtagatttttttcgggcggtttcgtttttttattttaagggggcgggtttagcggaaggcgggttaggtagaatgcggtttcgggcgcgtgtggatgacgttattcggcgcgtgtcggggtagttcgtagtaatttcgagtttgcggaagtggtgattcgtgggacgcggttgagataggtaatttgttcgttttttgttgggtttttgtttttttttttttcggcgtcgggatggcggcggggatagtattatttcgttttgaaggcgacggggaatttttttttatttttatttttgttcgattagcgaggattcgtattttttttttagtttttttagatttttggggttgaaatttattttggggattgggcggagcggttatattttattattttagttgtagaggtggttacgggttttggttgtttttttttcggcggtatagattttttttagtttttgggtgttttttttttcgttttttgtttttaggttttcggttatttgtcggtttcggtttttagttttatagggtttatttttagttttaagtaggtagaatagtttcgattcgatttatttttatttgtagtgaaatttattcgtttttttttttttcggaggatttttattgagagtattatattttgagttttggggtttttatagaatatttatattgttagtttggagttttgtttatgaacgtatgtatgggcggggagggggtggtatagtaatgtgattatgattatttattgtgataataaaatatttatttaggatttaatttattgttgagatgtatggaatagttaatagtattgtataaaatgttttttgtatttgatttttttttggttttcgtgtaatgatgataattatttttgtaaaggtagtttttaaaataagtaatataattcgttagggatgtttagatcgtaaaaaaataataataaggtttatatggttgataaagaaataatatgggttattataaaattagatagaatagatgttgagtatatgggacgagaagtagaattttgaaatttttgattttattgattgtttggttttgtatttttaaaatatttttagtttgttttatttttgaatagtgtatattgtgtttcgtataagtttgggaagttttttaatgatttgttaattgggaagattagatttttttaatatttgggggataaagtagaataaggttagggtataataatagttgtttattgttggtttatttgttttattttaggtattgtgtttaatattttgtatatgttttttttttattttatataattatttcgtgagttaggaattattatttttaatttatagagaaggaaattgagtttcggttatatgaaattgatttgttaaaaatttatagttaattaaatggtaaaattaagatttaaatttaggtttgaatataattttaaagtttgtattttttttaaaggattttattaatgtttaaattttaggttttttataatagttgtatataattttatgagtttgtttatttatataaatgatttaatattttttaatatttttaatattgtgttaa

SEQ ID NO: 208 - DNA, 3001 bp, homo sapiens
taaatttatttttaagtttgttatatttattttagaattatttttgaaatttgtttatttttattattttttatttgtttattgtaaaagtaatttttttttttgtatttttttaaattgttttttaaaagttttatgtatatatagtagttagtagggtgatgttataaaattagattttgttatttatgtgttgataattttttattagtttttttttatattttgaataaatttgtattttttataggaatttagagagtttgtgtatgatggggattttttttgtttttttgattttattttttgttttttttatgatttatttttttattttttttaaggtattatattttgttttttttttattgtttgtttatatgtagattttttttttggttgttttttttttagttttttatagagttggttgttttttagtttattgaatttttttagagggtatttttttgatattttaaattaaaaggttatttgtttttttttaattttttagtaatttattttttttttatttttttttttttttttgagatggagttttgttgttgtttaggttggagtgtagtggtgtgattttggtttattgtaggttttgttttttggggtttttgttatttttttgttttagttttttgagtagttgggattataggtgtttattattttgtttggttaattttttgtatttttagtagagatggggttttattgtgttagttaggatggttttgattttttgattttgtgatttgtttgttttggttttttaaagtgttgggattataagtgtgagttattgtgtttggtttttttttttatatttaatgtttgtttttttaattagaaagtaatttttatgagggaaggtatagtgtttgttttgtttttggttgtttttttagtttttgttaagggtgtttgtttggtatataggaggattttaaattgtggtggaattaatatgtgaataatagttatatgtagtagaggtgagattaggttaaggaataaaattgtatatttgtattttagtaattttttttaaattttatttgaaatagggttttgttttgtggtttagggtggagtgtagtggtatgtttatagtttattgtagttttgaatttttggatttaagtaatttttttgttttagtttttatagtagttggattataggtgtatgttattatatttggttaattttttaatttttttgtagagatggggtttttttaggttgtttaggttggtgattttttttttaagttttataaagattttgtaattaggaatattagggtattagggtaattttataagttttagttagttaagttgtttgtgtttttttatgattgtggtagttttgtgtttgtgtagattttttttgggtggttttgtttttttattttaagggggtgggtttagtggaaggtgggttaggtagaatgtggttttgggtgtgtgtggatgatgttatttggtgtgtgttggggtagtttgtagtaattttgagtttgtggaagtggtgatttgtgggatgtggttgagataggtaatttgtttgttttttgttgggtttttgttttttttttttttggtgttgggatggtggtggggatagtattattttgttttgaaggtgatggggaatttttttttatttttatttttgtttgattagtgaggatttgtattttttttttagtttttttagatttttggggttgaaatttattttggggattgggtggagtggttatattttattattttagttgtagaggtggttatgggttttggttgttttttttttggtggtatagattttttttagtttttgggtgtttttttttttgttttttgtttttaggtttttggttatttgttggttttggtttttagttttatagggtttatttttagttttaagtaggtagaatagttttgatttgatttatttttatttgtagtgaaatttatttgttttttttttttttggaggatttttattgagagtattatattttgagttttggggtttttatagaatatttatattgttagtttggagttttgtttatgaatgtatgtatgggtggggagggggtggtatagtaatgtgattatgattatttattgtgataataaaatatttatttaggatttaatttattgttgagatgtatggaatagttaatagtattgtataaaatgttttttgtatttgatttttttttggtttttgtgtaatgatgataattatttttgtaaaggtagtttttaaaataagtaatataatttgttagggatgtttagattgtaaaaaaataataataaggtttatatggttgataaagaaataatatgggttattataaaattagatagaatagatgttgagtatatgggatgagaagtagaattttgaaatttttgattttattgattgtttggttttgtatttttaaaatatttttagtttgttttatttttgaatagtgtatattgtgttttgtataagtttgggaagttttttaatgatttgttaattgggaagattagatttttttaatatttgggggataaagtagaataaggttagggtataataatagttgtttattgttggtttatttgttttattttaggtattgtgtttaatattttgtatatgttttttttttattttatataattattttgtgagttaggaattattatttttaatttatagagaaggaaattgagttttggttatatgaaattgatttgttaaaaatttatagttaattaaatggtaaaattaagatttaaatttaggtttgaatataattttaaagtttgtattttttttaaaggattttattaatgtttaaattttaggttttttataatagttgtatataattttatgagtttgtttatttatataaatgatttaatattttttaatatttttaatattgtgttaa

SEQ ID NO: 209 - DNA, 3001 bp, homo sapiens
ttaatatagtattaaagatattaaaaagtgttaaattatttgtgtaggtgaataaatttataaaattgtgtgtaattattgtaaaaagtttaaaatttgagtattagtagagttttttaagaaaagtgtaggttttgaagttatatttagatttgaatttaaattttgattttgttatttagttaattgtgaatttttagtaagttaattttatataatcgaaatttaatttttttttttataaattgggggtaataatttttaatttacgaggtggttgtatgaagtaaggagaaaatatatgtaaagtgttgaatatagtatttgggataaagtagatgggttaatagtaagtaattattattatattttaattttattttattttgttttttaaatattggaagaatttaatttttttaattagtaagttattggaaggttttttagatttatacgaagtataatatatattatttaaaaatggaatagattaaaagtattttaaaaatataaaattaaataattaatgagattaaggattttagaattttgtttttcgttttatatatttagtatttattttgtttggttttgtaataatttatattatttttttattaattatatgaattttattgttgtttttttgcgatttaaatatttttagcgggttatgttatttattttgagggttatttttgtaagggtaattgttattattgtacgaaaattaaaaagaaattaggtataaggggtattttatgtaatgttattaattgttttatgtattttaatagtggattggattttaagtggatattttattattataatagataattataattatattattgtgttatttttttttcgtttatgtatgcgtttatgaataaaattttagattaatagtatgaatgttttatagggattttaaaatttaaaatgtggtgtttttagtaaagatttttcgggggaagaagaggcggatgggttttattgtaagtggaaatgaatcgaatcgaaattgttttgtttatttaagattggagatgagttttgtggggttagaagtcgagatcggtaggtgatcgagggtttggaggtaagagacgaaggaggaggtatttagaggttgagaaaggtttgtgtcgtcggggagaagatagttagagttcgtggttatttttatagttgaggtggtaagatgtgatcgtttcgtttagtttttaggatgggttttagttttaggagtttgggagaattgaggaggggatgcgggttttcgttggtcgagtaaaagtgagggtaagggagggtttttcgtcgtttttagaacggaatgatgttgttttcgtcgttatttcgacgtcggaggagaggaaggtagggatttaatagggagcgaataggttatttgttttagtcgcgttttacgggttattattttcgtagattcggggttattacgggttatttcggtacgcgtcgggtgacgttatttatacgcgttcggggtcgtattttgtttgattcgtttttcgttaggttcgtttttttaggatgagagggcgagatcgttcgggggagatttgcgtaggcgcggagttgtcgcggttataggagggcgcgagtagtttggttggttagggtttgtagagttgttttggtattttagtatttttaattgtaaaatttttatgaagtttaagaaaaaaattattagtttgggtaatttggggaggtttcgtttttataaaaaaattaaaaaattagtcgagtgtggtggcgtgtatttgtggtttagttattatggaggttgaggtaggaggattgtttaggtttaggagttcgaggttgtaatgagttatgaacgtgttattatattttattttgagttatagagtaagattttgttttaaataaaatttaaaaaaagttattgaaatatagatgtgtaattttattttttagtttagttttatttttgttgtatgtgattattgtttatatattaattttattataatttaaggtttttttgtgtgttaggtaagtatttttaataaaagttggggaaataattaggaataagatagacgttgtgtttttttttatggggattattttttagttgagaaagtaaatattaaatgtagaaggaaaggtcgggcgcggtggtttacgtttgtaattttagtattttgggaggtcgaggtaggcggattataaagttaggagatcgagattattttggttaatacggtgaaatttcgtttttattaaaaatataaaaaattagtcgggcgaggtggtgggcgtttgtagttttagttattcgggaggttgaggtaggagaatggcgggaatttcggggggcggagtttgtagtgagtcgagatcgcgttattgtattttaatttgggcgatagcgagattttattttaaaaaaaaaaaaaaaagtagaaggaaaataagttgttgagaaattaaaggaagataggtgattttttgatttgagatgttaagaaagtgttttttgaagaggtttagtaaattgagaagtagttaattttgtggagagttaaggaaagaatagttaagagaagaatttatatgtgagtaagtaatagggaaggggtagaatgtggtgttttggagaaagtgagaaagtaggttatgggaagaatagaggatgagattaagaaggtaaggagagtttttattatgtatagattttttgggtttttgtgaggaatacgagtttattcgaagtgtaaggggaaattagtgaagagttattaatacgtaagtgataggatttagttttataatattattttgttagttgttgtgtatatatgaaatttttgagaaataatttaaaaggatgtaaagagaagagttgtttttgtaatgagtaggtaagaaatgatagaaatggataaattttaggaataattttgaggtagatgtgatagatttggagatgagttta

SEQ ID NO: 210 - DNA, 3001 bp, homo sapiens
ttaatatagtattaaagatattaaaaagtgttaaattatttgtgtaggtgaataaatttataaaattgtgtgtaattattgtaaaaagtttaaaatttgagtattagtagagttttttaagaaaagtgtaggttttgaagttatatttagatttgaatttaaattttgattttgttatttagttaattgtgaatttttagtaagttaattttatataattgaaatttaatttttttttttataaattgggggtaataatttttaatttatgaggtggttgtatgaagtaaggagaaaatatatgtaaagtgttgaatatagtatttgggataaagtagatgggttaatagtaagtaattattattatattttaattttattttattttgttttttaaatattggaagaatttaatttttttaattagtaagttattggaaggttttttagatttatatgaagtataatatatattatttaaaaatggaatagattaaaagtattttaaaaatataaaattaaataattaatgagattaaggattttagaattttgttttttgttttatatatttagtatttattttgtttggttttgtaataatttatattatttttttattaattatatgaattttattgttgtttttttgtgatttaaatatttttagtgggttatgttatttattttgagggttatttttgtaagggtaattgttattattgtatgaaaattaaaaagaaattaggtataaggggtattttatgtaatgttattaattgttttatgtattttaatagtggattggattttaagtggatattttattattataatagataattataattatattattgtgttattttttttttgtttatgtatgtgtttatgaataaaattttagattaatagtatgaatgttttatagggattttaaaatttaaaatgtggtgtttttagtaaagattttttgggggaagaagaggtggatgggttttattgtaagtggaaatgaattgaattgaaattgttttgtttatttaagattggagatgagttttgtggggttagaagttgagattggtaggtgattgagggtttggaggtaagagatgaaggaggaggtatttagaggttgagaaaggtttgtgttgttggggagaagatagttagagtttgtggttatttttatagttgaggtggtaagatgtgattgttttgtttagtttttaggatgggttttagttttaggagtttgggagaattgaggaggggatgtgggtttttgttggttgagtaaaagtgagggtaagggagggttttttgttgtttttagaatggaatgatgttgtttttgttgttattttgatgttggaggagaggaaggtagggatttaatagggagtgaataggttatttgttttagttgtgttttatgggttattatttttgtagatttggggttattatgggttattttggtatgtgttgggtgatgttatttatatgtgtttggggttgtattttgtttgatttgttttttgttaggtttgtttttttaggatgagagggtgagattgtttgggggagatttgtgtaggtgtggagttgttgtggttataggagggtgtgagtagtttggttggttagggtttgtagagttgttttggtattttagtatttttaattgtaaaatttttatgaagtttaagaaaaaaattattagtttgggtaatttggggaggttttgtttttataaaaaaattaaaaaattagttgagtgtggtggtgtgtatttgtggtttagttattatggaggttgaggtaggaggattgtttaggtttaggagtttgaggttgtaatgagttatgaatgtgttattatattttattttgagttatagagtaagattttgttttaaataaaatttaaaaaaagttattgaaatatagatgtgtaattttattttttagtttagttttatttttgttgtatgtgattattgtttatatattaattttattataatttaaggtttttttgtgtgttaggtaagtatttttaataaaagttggggaaataattaggaataagatagatgttgtgtttttttttatggggattattttttagttgagaaagtaaatattaaatgtagaaggaaaggttgggtgtggtggtttatgtttgtaattttagtattttgggaggttgaggtaggtggattataaagttaggagattgagattattttggttaatatggtgaaattttgtttttattaaaaatataaaaaattagttgggtgaggtggtgggtgtttgtagttttagttatttgggaggttgaggtaggagaatggtgggaattttggggggtggagtttgtagtgagttgagattgtgttattgtattttaatttgggtgatagtgagattttattttaaaaaaaaaaaaaaaagtagaaggaaaataagttgttgagaaattaaaggaagataggtgattttttgatttgagatgttaagaaagtgttttttgaagaggtttagtaaattgagaagtagttaattttgtggagagttaaggaaagaatagttaagagaagaatttatatgtgagtaagtaatagggaaggggtagaatgtggtgttttggagaaagtgagaaagtaggttatgggaagaatagaggatgagattaagaaggtaaggagagtttttattatgtatagattttttgggtttttgtgaggaatatgagtttatttgaagtgtaaggggaaattagtgaagagttattaatatgtaagtgataggatttagttttataatattattttgttagttgttgtgtatatatgaaatttttgagaaataatttaaaaggatgtaaagagaagagttgtttttgtaatgagtaggtaagaaatgatagaaatggataaattttaggaataattttgaggtagatgtgatagatttggagatgagttta

SEQ ID NO: 211 - DNA, 50 bp, homo sapiens
cgcagcctgtagtagccaggtttcaccactaggtggcacacgccaaaggc

SEQ ID NO: 212 - DNA, 50 bp, homo sapiens
cgtagtttgtagtagttaggttttattattaggtggtatacgttaaaggt

SEQ ID NO: 213 - DNA, 50 bp, homo sapiens
tgtagtttgtagtagttaggttttattattaggtggtatatgttaaaggt

SEQ ID NO: 214 - DNA, 50 bp, homo sapiens
gtttttggcgtgtgttatttagtggtgaaatttggttattataggttgcg

SEQ ID NO: 215 - DNA, 50 bp, homo sapiens
gtttttggtgtgtgttatttagtggtgaaatttggttattataggttgtg

SEQ ID NO: 216 - DNA, 3001 bp, homo sapiens
ccagccggaaatgcccaaaagttatcctgtatggtgtaaaaggggagtaaccctcagttctgagggaaatccctgcccctttcctagggatacagaaaactcatgaataatccatcctttgtttagcatacagtcaagaagtaactataagtatacttgactgagtatacttatagtatgggctcgctgctctgtctatggagtagtcattcttttattcctttaattctctaataaacttgattttagtcggaggtggtggctcatgcctgtaatcccaccactttgggaggccaaggcaggcagattgctggaattcaggaattcgagaccagcctggccaccatggaaaaaccctatctctacaaaaaatacaaaaattagctgggcttggtggctcacacctgtggttccagctactaggaaggctgaggtgggaagtcacttgaacccgggaggcagagtgcaccacggcactccagcctaggtgacagagcaagactctaaaaaaagaaaatccaaaaacccttactttcagttaaaaaattttgttttcaattcatctactgactccctggtatctacaacttaactagtctagtgaacttggggaagttactcctttttttttttttaagacagaatcttgctctattgcccaggctggagtgcagtggcacgatcctgactcactgcaacctccacctcttgggttcaagcgattctactgcttcagtctcccgagtagctggaattataggcacatgccaccacacccggctaatctttatatttttagtagagttggggtttcaccattttggccagggtggtctcagactcctggtctcaagtgatccgcccaccttggcctctcaaagtgctgggattacaggcgtcagccactgctcctggcctctagttacttcttaaactctctgaaccttgttttttttaaatcctctaaataaggataacagttcataattcctaacttttgttatgaaaattaaaggagttaatatatattatgtggagaaatgtaaattctagttcaaaaaatagaagaaataatgtaaatactgatttatttatctggtgagaaatgcaaggacatttttgtttggtggtgggtattaaaaggctaaggtatttatattccactggatacatttggaagaatgattaacagtgttatttcaaaatttcaacattgagaacacactaggacttacatctttttcaactcatcatgatgaaaaattttgtcagcgaaatgtgttaggattgttttataaaaatctttcacgtcgatgagcaaatatcttagaagactactgctgaggagaaatgttatttatccagagagttgccttaattaggagaccctacatagcgcccagtagaaatgtaataaaggcatttcacttattcccttcctcagccctgccgtgaacaaaattgaatgaaatcaaccacgctccgagttctcgcctagacgcagcctgtagtagccaggtttcaccactaggtggcacacgccaaaggctccggcgggggcgagccgcccgagcacgcctctcggtggccccgtggtatctctcggcttccgttgagcaccaagcaagatggcagcttccgagacggttaggctacggcttcaatttgattacccgccgccagctaccccgcactgtacggccttctggcttctggtcgacttgaacagatgccgagtcgtcacagatctcattagtctcatccgccagcgcttcggcttcagttctggggccttcctaggcctctacctggagggggggctcttgccccccgccgagagcgcgcgccttgtgagagacaacgactgcctcaggtgcgcggcgcagggagcgggacggccgggtgggcggcgggcgggggacgcgcctgcgcacgcccgggcctgaagccgctagacctggtagtggaggggatgggggatggggaaggggacgagggttggaggggggtggggctgtaaaaatgcacgttcgcgaaccccggagatcctgattggtgtagtcaactttggggctcaggaatctgcattttattattattttttattattatttttttttttttgagacggagtcctgctttgtcacccaggctggagtacagtggcgcgatctcggttcactgcaacctccacctcccgggttcaagcaattttcctgcctcagcctcccgagtagctgggactacaggcgtccgccaccacgcccggctaatttttgtatttttagtagagatggggtttcaccatattggtcaaggtggtctcgaactcctgacctcagttgatccgcttgcatcggcctctcaaagtgctgggattgcaggcgtgcaccaccgcatcctgcccctattatttttatttttgagactgagtctcattctgtcacccaggctggagtgcagtggcgcgatctcagctcactgcagcctccacctcccgggttcaatcgatcctcccacctcagcctcccgagtagctgggcttacaggcgggcgccaccatgcccggctaattttttgtttgtttgtttgtatttttagtagagacggggtttcaccgtgttggccaggctggtcttgaactcctgacgttaagtgatcctcccggcttcccaaagtgctgggattacaggcgtgagcctccgcgcctggctggaatctgcagtgtaacgagcatccttcccgggatgcttctgatgacaggagaatcaaacttggaaaatccctgatgcctaagggcagggccaggctttctttcagccttgatttagcacatccgcgcttagctaggcactgtgcgactctgttgcgtgcccatggtgcagatgtgccggagacccggccttacccatggcggccttcagggtcaggtgcaggaagctgacaaaggggaatcgttgtgttttcttcataacctgctgttgtccagccttagttctca

SEQ ID NO: 217 - DNA, 3001 bp, homo sapiens
ttagtcggaaatgtttaaaagttattttgtatggtgtaaaaggggagtaatttttagttttgagggaaatttttgttttttttttagggatatagaaaatttatgaataatttattttttgtttagtatatagttaagaagtaattataagtatatttgattgagtatatttatagtatgggttcgttgttttgtttatggagtagttatttttttatttttttaattttttaataaatttgattttagtcggaggtggtggtttatgtttgtaattttattattttgggaggttaaggtaggtagattgttggaatttaggaattcgagattagtttggttattatggaaaaattttatttttataaaaaatataaaaattagttgggtttggtggtttatatttgtggttttagttattaggaaggttgaggtgggaagttatttgaattcgggaggtagagtgtattacggtattttagtttaggtgatagagtaagattttaaaaaaagaaaatttaaaaatttttatttttagttaaaaaattttgtttttaatttatttattgattttttggtatttataatttaattagtttagtgaatttggggaagttatttttttttttttttttaagatagaattttgttttattgtttaggttggagtgtagtggtacgattttgatttattgtaatttttattttttgggtttaagcgattttattgttttagtttttcgagtagttggaattataggtatatgttattatattcggttaatttttatatttttagtagagttggggttttattattttggttagggtggttttagatttttggttttaagtgattcgtttattttggttttttaaagtgttgggattataggcgttagttattgtttttggtttttagttattttttaaattttttgaattttgttttttttaaattttttaaataaggataatagtttataatttttaatttttgttatgaaaattaaaggagttaatatatattatgtggagaaatgtaaattttagtttaaaaaatagaagaaataatgtaaatattgatttatttatttggtgagaaatgtaaggatatttttgtttggtggtgggtattaaaaggttaaggtatttatattttattggatatatttggaagaatgattaatagtgttattttaaaattttaatattgagaatatattaggatttatattttttttaatttattatgatgaaaaattttgttagcgaaatgtgttaggattgttttataaaaattttttacgtcgatgagtaaatattttagaagattattgttgaggagaaatgttatttatttagagagttgttttaattaggagattttatatagcgtttagtagaaatgtaataaaggtattttatttatttttttttttagttttgtcgtgaataaaattgaatgaaattaattacgtttcgagttttcgtttagacgtagtttgtagtagttaggttttattattaggtggtatacgttaaaggtttcggcgggggcgagtcgttcgagtacgtttttcggtggtttcgtggtatttttcggttttcgttgagtattaagtaagatggtagttttcgagacggttaggttacggttttaatttgattattcgtcgttagttatttcgtattgtacggttttttggtttttggtcgatttgaatagatgtcgagtcgttatagattttattagttttattcgttagcgtttcggttttagttttggggtttttttaggtttttatttggagggggggtttttgtttttcgtcgagagcgcgcgttttgtgagagataacgattgttttaggtgcgcggcgtagggagcgggacggtcgggtgggcggcgggcgggggacgcgtttgcgtacgttcgggtttgaagtcgttagatttggtagtggaggggatgggggatggggaaggggacgagggttggaggggggtggggttgtaaaaatgtacgttcgcgaatttcggagattttgattggtgtagttaattttggggtttaggaatttgtattttattattattttttattattatttttttttttttgagacggagttttgttttgttatttaggttggagtatagtggcgcgatttcggtttattgtaatttttatttttcgggtttaagtaatttttttgttttagtttttcgagtagttgggattataggcgttcgttattacgttcggttaatttttgtatttttagtagagatggggttttattatattggttaaggtggtttcgaatttttgattttagttgattcgtttgtatcggttttttaaagtgttgggattgtaggcgtgtattatcgtattttgtttttattatttttatttttgagattgagttttattttgttatttaggttggagtgtagtggcgcgattttagtttattgtagtttttatttttcgggtttaatcgatttttttattttagtttttcgagtagttgggtttataggcgggcgttattatgttcggttaattttttgtttgtttgtttgtatttttagtagagacggggttttatcgtgttggttaggttggttttgaatttttgacgttaagtgattttttcggttttttaaagtgttgggattataggcgtgagttttcgcgtttggttggaatttgtagtgtaacgagtatttttttcgggatgtttttgatgataggagaattaaatttggaaaatttttgatgtttaagggtagggttaggtttttttttagttttgatttagtatattcgcgtttagttaggtattgtgcgattttgttgcgtgtttatggtgtagatgtgtcggagattcggttttatttatggcggtttttagggttaggtgtaggaagttgataaaggggaatcgttgtgttttttttataatttgttgttgtttagttttagttttta

SEQ ID NO: 218 - DNA, 3001 bp, homo sapiens
ttagttggaaatgtttaaaagttattttgtatggtgtaaaaggggagtaatttttagttttgagggaaatttttgttttttttttagggatatagaaaatttatgaataatttattttttgtttagtatatagttaagaagtaattataagtatatttgattgagtatatttatagtatgggtttgttgttttgtttatggagtagttatttttttatttttttaattttttaataaatttgattttagttggaggtggtggtttatgtttgtaattttattattttgggaggttaaggtaggtagattgttggaatttaggaatttgagattagtttggttattatggaaaaattttatttttataaaaaatataaaaattagttgggtttggtggtttatatttgtggttttagttattaggaaggttgaggtgggaagttatttgaatttgggaggtagagtgtattatggtattttagtttaggtgatagagtaagattttaaaaaaagaaaatttaaaaatttttatttttagttaaaaaattttgtttttaatttatttattgattttttggtatttataatttaattagtttagtgaatttggggaagttatttttttttttttttttaagatagaattttgttttattgtttaggttggagtgtagtggtatgattttgatttattgtaatttttattttttgggtttaagtgattttattgttttagttttttgagtagttggaattataggtatatgttattatatttggttaatttttatatttttagtagagttggggttttattattttggttagggtggttttagatttttggttttaagtgatttgtttattttggttttttaaagtgttgggattataggtgttagttattgtttttggtttttagttattttttaaattttttgaattttgttttttttaaattttttaaataaggataatagtttataatttttaatttttgttatgaaaattaaaggagttaatatatattatgtggagaaatgtaaattttagtttaaaaaatagaagaaataatgtaaatattgatttatttatttggtgagaaatgtaaggatatttttgtttggtggtgggtattaaaaggttaaggtatttatattttattggatatatttggaagaatgattaatagtgttattttaaaattttaatattgagaatatattaggatttatattttttttaatttattatgatgaaaaattttgttagtgaaatgtgttaggattgttttataaaaattttttatgttgatgagtaaatattttagaagattattgttgaggagaaatgttatttatttagagagttgttttaattaggagattttatatagtgtttagtagaaatgtaataaaggtattttatttatttttttttttagttttgttgtgaataaaattgaatgaaattaattatgttttgagtttttgtttagatgtagtttgtagtagttaggttttattattaggtggtatatgttaaaggttttggtgggggtgagttgtttgagtatgttttttggtggttttgtggtattttttggtttttgttgagtattaagtaagatggtagtttttgagatggttaggttatggttttaatttgattatttgttgttagttattttgtattgtatggttttttggtttttggttgatttgaatagatgttgagttgttatagattttattagttttatttgttagtgttttggttttagttttggggtttttttaggtttttatttggagggggggtttttgttttttgttgagagtgtgtgttttgtgagagataatgattgttttaggtgtgtggtgtagggagtgggatggttgggtgggtggtgggtgggggatgtgtttgtgtatgtttgggtttgaagttgttagatttggtagtggaggggatgggggatggggaaggggatgagggttggaggggggtggggttgtaaaaatgtatgtttgtgaattttggagattttgattggtgtagttaattttggggtttaggaatttgtattttattattattttttattattatttttttttttttgagatggagttttgttttgttatttaggttggagtatagtggtgtgattttggtttattgtaatttttattttttgggtttaagtaatttttttgttttagttttttgagtagttgggattataggtgtttgttattatgtttggttaatttttgtatttttagtagagatggggttttattatattggttaaggtggttttgaatttttgattttagttgatttgtttgtattggttttttaaagtgttgggattgtaggtgtgtattattgtattttgtttttattatttttatttttgagattgagttttattttgttatttaggttggagtgtagtggtgtgattttagtttattgtagtttttattttttgggtttaattgatttttttattttagttttttgagtagttgggtttataggtgggtgttattatgtttggttaattttttgtttgtttgtttgtatttttagtagagatggggttttattgtgttggttaggttggttttgaatttttgatgttaagtgatttttttggttttttaaagtgttgggattataggtgtgagtttttgtgtttggttggaatttgtagtgtaatgagtattttttttgggatgtttttgatgataggagaattaaatttggaaaatttttgatgtttaagggtagggttaggtttttttttagttttgatttagtatatttgtgtttagttaggtattgtgtgattttgttgtgtgtttatggtgtagatgtgttggagatttggttttatttatggtggtttttagggttaggtgtaggaagttgataaaggggaattgttgtgttttttttataatttgttgttgtttagttttagttttta

SEQ ID NO: 219 - DNA, 3001 bp, homo sapiens
tgagaattaaggttggataatagtaggttatgaagaaaatataacgatttttttttgttagttttttgtatttgattttgaaggtcgttatgggtaaggtcgggttttcggtatatttgtattatgggtacgtaatagagtcgtatagtgtttagttaagcgcggatgtgttaaattaaggttgaaagaaagtttggttttgtttttaggtattagggattttttaagtttgatttttttgttattagaagtatttcgggaaggatgttcgttatattgtagattttagttaggcgcggaggtttacgtttgtaattttagtattttgggaagtcgggaggattatttaacgttaggagtttaagattagtttggttaatacggtgaaatttcgtttttattaaaaatataaataaataaataaaaaattagtcgggtatggtggcgttcgtttgtaagtttagttattcgggaggttgaggtgggaggatcgattgaattcgggaggtggaggttgtagtgagttgagatcgcgttattgtattttagtttgggtgatagaatgagatttagttttaaaaataaaaataataggggtaggatgcggtggtgtacgtttgtaattttagtattttgagaggtcgatgtaagcggattaattgaggttaggagttcgagattattttgattaatatggtgaaattttatttttattaaaaatataaaaattagtcgggcgtggtggcggacgtttgtagttttagttattcgggaggttgaggtaggaaaattgtttgaattcgggaggtggaggttgtagtgaatcgagatcgcgttattgtattttagtttgggtgataaagtaggatttcgttttaaaaaaaaaaaaataataataaaaaataataataaaatgtagatttttgagttttaaagttgattatattaattaggattttcggggttcgcgaacgtgtatttttatagttttatttttttttaattttcgtttttttttttattttttattttttttattattaggtttagcggttttaggttcgggcgtgcgtaggcgcgtttttcgttcgtcgtttattcggtcgtttcgttttttgcgtcgcgtatttgaggtagtcgttgttttttataaggcgcgcgttttcggcggggggtaagagttttttttttaggtagaggtttaggaaggttttagaattgaagtcgaagcgttggcggatgagattaatgagatttgtgacgattcggtatttgtttaagtcgattagaagttagaaggtcgtatagtgcggggtagttggcggcgggtaattaaattgaagtcgtagtttaatcgtttcggaagttgttattttgtttggtgtttaacggaagtcgagagatattacggggttatcgagaggcgtgttcgggcggttcgttttcgtcggagtttttggcgtgtgttatttagtggtgaaatttggttattataggttgcgtttaggcgagaattcggagcgtggttgattttatttaattttgtttacggtagggttgaggaagggaataagtgaaatgtttttattatatttttattgggcgttatgtagggttttttaattaaggtaattttttggataaataatatttttttttagtagtagttttttaagatatttgtttatcgacgtgaaagatttttataaaataattttaatatatttcgttgataaaattttttattatgatgagttgaaaaagatgtaagttttagtgtgtttttaatgttgaaattttgaaataatattgttaattatttttttaaatgtatttagtggaatataaatattttagttttttaatatttattattaaataaaaatgtttttgtattttttattagataaataaattagtatttatattattttttttattttttgaattagaatttatatttttttatataatatatattaatttttttaatttttataataaaagttaggaattatgaattgttatttttatttagaggatttaaaaaaaataaggtttagagagtttaagaagtaattagaggttaggagtagtggttgacgtttgtaattttagtattttgagaggttaaggtgggcggattatttgagattaggagtttgagattattttggttaaaatggtgaaattttaattttattaaaaatataaagattagtcgggtgtggtggtatgtgtttataattttagttattcgggagattgaagtagtagaatcgtttgaatttaagaggtggaggttgtagtgagttaggatcgtgttattgtattttagtttgggtaatagagtaagattttgttttaaaaaaaaaaaaaggagtaatttttttaagtttattagattagttaagttgtagatattagggagttagtagatgaattgaaaataaaattttttaattgaaagtaagggtttttggattttttttttttagagttttgttttgttatttaggttggagtgtcgtggtgtattttgtttttcgggtttaagtgattttttattttagtttttttagtagttggaattataggtgtgagttattaagtttagttaatttttgtattttttgtagagatagggtttttttatggtggttaggttggtttcgaatttttgaattttagtaatttgtttgttttggttttttaaagtggtgggattataggtatgagttattattttcgattaaaattaagtttattagagaattaaaggaataaaagaatgattattttatagatagagtagcgagtttatattataagtatatttagttaagtatatttatagttattttttgattgtatgttaaataaaggatggattatttatgagttttttgtatttttaggaaaggggtagggattttttttagaattgagggttattttttttttatattatataggataatttttgggtattttcggttgg

SEQ ID NO: 220 - DNA, 3001 bp, homo sapiens
tgagaattaaggttggataatagtaggttatgaagaaaatataatgatttttttttgttagttttttgtatttgattttgaaggttgttatgggtaaggttgggtttttggtatatttgtattatgggtatgtaatagagttgtatagtgtttagttaagtgtggatgtgttaaattaaggttgaaagaaagtttggttttgtttttaggtattagggattttttaagtttgatttttttgttattagaagtattttgggaaggatgtttgttatattgtagattttagttaggtgtggaggtttatgtttgtaattttagtattttgggaagttgggaggattatttaatgttaggagtttaagattagtttggttaatatggtgaaattttgtttttattaaaaatataaataaataaataaaaaattagttgggtatggtggtgtttgtttgtaagtttagttatttgggaggttgaggtgggaggattgattgaatttgggaggtggaggttgtagtgagttgagattgtgttattgtattttagtttgggtgatagaatgagatttagttttaaaaataaaaataataggggtaggatgtggtggtgtatgtttgtaattttagtattttgagaggttgatgtaagtggattaattgaggttaggagtttgagattattttgattaatatggtgaaattttatttttattaaaaatataaaaattagttgggtgtggtggtggatgtttgtagttttagttatttgggaggttgaggtaggaaaattgtttgaatttgggaggtggaggttgtagtgaattgagattgtgttattgtattttagtttgggtgataaagtaggattttgttttaaaaaaaaaaaaataataataaaaaataataataaaatgtagatttttgagttttaaagttgattatattaattaggatttttggggtttgtgaatgtgtatttttatagttttatttttttttaatttttgtttttttttttattttttattttttttattattaggtttagtggttttaggtttgggtgtgtgtaggtgtgttttttgtttgttgtttatttggttgttttgttttttgtgttgtgtatttgaggtagttgttgttttttataaggtgtgtgtttttggtggggggtaagagttttttttttaggtagaggtttaggaaggttttagaattgaagttgaagtgttggtggatgagattaatgagatttgtgatgatttggtatttgtttaagttgattagaagttagaaggttgtatagtgtggggtagttggtggtgggtaattaaattgaagttgtagtttaattgttttggaagttgttattttgtttggtgtttaatggaagttgagagatattatggggttattgagaggtgtgtttgggtggtttgtttttgttggagtttttggtgtgtgttatttagtggtgaaatttggttattataggttgtgtttaggtgagaatttggagtgtggttgattttatttaattttgtttatggtagggttgaggaagggaataagtgaaatgtttttattatatttttattgggtgttatgtagggttttttaattaaggtaattttttggataaataatatttttttttagtagtagttttttaagatatttgtttattgatgtgaaagatttttataaaataattttaatatattttgttgataaaattttttattatgatgagttgaaaaagatgtaagttttagtgtgtttttaatgttgaaattttgaaataatattgttaattatttttttaaatgtatttagtggaatataaatattttagttttttaatatttattattaaataaaaatgtttttgtattttttattagataaataaattagtatttatattattttttttattttttgaattagaatttatatttttttatataatatatattaatttttttaatttttataataaaagttaggaattatgaattgttatttttatttagaggatttaaaaaaaataaggtttagagagtttaagaagtaattagaggttaggagtagtggttgatgtttgtaattttagtattttgagaggttaaggtgggtggattatttgagattaggagtttgagattattttggttaaaatggtgaaattttaattttattaaaaatataaagattagttgggtgtggtggtatgtgtttataattttagttatttgggagattgaagtagtagaattgtttgaatttaagaggtggaggttgtagtgagttaggattgtgttattgtattttagtttgggtaatagagtaagattttgttttaaaaaaaaaaaaaggagtaatttttttaagtttattagattagttaagttgtagatattagggagttagtagatgaattgaaaataaaattttttaattgaaagtaagggtttttggattttttttttttagagttttgttttgttatttaggttggagtgttgtggtgtattttgttttttgggtttaagtgattttttattttagtttttttagtagttggaattataggtgtgagttattaagtttagttaatttttgtattttttgtagagatagggtttttttatggtggttaggttggttttgaatttttgaattttagtaatttgtttgttttggttttttaaagtggtgggattataggtatgagttattatttttgattaaaattaagtttattagagaattaaaggaataaaagaatgattattttatagatagagtagtgagtttatattataagtatatttagttaagtatatttatagttattttttgattgtatgttaaataaaggatggattatttatgagttttttgtatttttaggaaaggggtagggattttttttagaattgagggttattttttttttatattatataggataatttttgggtatttttggttgg

SEQ ID NO: 221 - DNA, 50 bp, homo sapiens
ctctcacttaccatctcagcagcagtgtctctactcaggttcaggagacg

SEQ ID NO: 222 - DNA, 50 bp, homo sapiens
tttttatttattattttagtagtagtgtttttatttaggtttaggagacg

SEQ ID NO: 223 - DNA, 50 bp, homo sapiens
tttttatttattattttagtagtagtgtttttatttaggtttaggagatg

SEQ ID NO: 224 - DNA, 50 bp, homo sapiens
cgttttttgaatttgagtagagatattgttgttgagatggtaagtgagag

SEQ ID NO: 225 - DNA, 50 bp, homo sapiens
tgttttttgaatttgagtagagatattgttgttgagatggtaagtgagag

SEQ ID NO: 226 - DNA, 3001 bp, homo sapiens
gctgaggtcgtctctgggcacccagaaggagtggagtcaaggccacaaactttgctcccttcccgcaggaaggagtgcctgaggtccttgtccattccaagtagcctcccttccttgatcctctgcaattcaagcaccccatgtggggccagaggaaagtcctgccagaaggtggcacttgggcctgggcacttcctctgggccttgggcaggccccaagtttccttgggtttgccctcacctctgacctcattaaccataatgacaataatgaccaggataggagcagctcctgctggggagcactgtgggcttcagcgctctgtggctctgactccttgggatgaaatgggctgtctgcctcctctctggagggctaatcattacataactgttggcacagaaaccccctggggtcctgaacagccacagccatagatctctccccatgtcgaccccaccccctagattaagacattcctgctggaggccctgccgtaggcactcaccggggttggagggcagtgctgcttgtagtggctggccatcatggtcaaggggcccttgagcttggtgaggctgccccgcaggccctgcttgtacagctccaggcgggtctgtaggcaggtcggctcctgtggaaaatgtcgttcgtcggtgagcagtggccaagtgcccacagtggtacaagaactctccaccactcctttttgctgctgcccccagcccccaggagtagggcttgggaggggcacaggctgggtccagtcatagaccctgccctgtccatggcaggcacgaacctgcccttctcactgccccgcccaggccaccctcagcggcacctggagaggagcccagccttagggaaggaggtgactctcaccccatcattcagggagaggggggtggggcctcacctggacctgctgggtgggcaagggttgttcctgaaacccctctgtgcctctctgtagtcagcactgtctcaacaggacttggtctcggggcacagtgagcgccccaaacccacagctcctgtctcatgaagtgacccccactttaccacctgtcccctggtgactcctggccattgaatgctaggtctgcccatggccgctcagctgataaaggagctcatgtgactgccataggggcacggccagcagcctcttgagcacccagttgctaccccctcctcctgcagccagctgactggagagaaagtggacaaccctgtgtggtgccatctaaaatggagtccccacctccaccccagggcaggggcttctggaaagctatgtcagagagaagcatcttacctggaggtcaaacatttctgagatgacttctactgtttcattctgtagaaaaggaaaatgtcatgttatcaagctgacaggcgtggccagtcaggggccagctgggtggcctaggcacaggcccacattctctcacttaccatctcagcagcagtgtctctactcaggttcaggagacgccgggcctcctggatggcattcacatgctcccagggctgcgtgctggggctgggcgagcgggcgggtgcagagatgctgcaggccacagtgcccaagagcagcaggctctgcagccacatcctccagagaactttagcctttctctctgtgtactgggctcactggcaaaagagctcttaaatacacagaggaaatgattaatggtgaccacaaaatgccagggaggcgggggaactacctgaactgtggaatctcctggcccttatcagccacacatgggaacggtgagccttttccctaggtggtcaggcttgggggttttcattaatgaacctttccaagaaccgacagcccacccacccgccttcctgagggctctccagccctccctgggcagtctgaatgggcctgaggctgccccctccctctgaggggcacagtttggacttcctggcctggaatggctggggtggggcgtgggagacacttagatagggctccccatcctgcctgtaatcccaggggcctttgggcaggctatgcccgccctggtgcctcattctgactccagccttcctcttctctggccactgtgagagacttgagtgtgaggggagctctcacagacctgccccactgacagttcacatgggctcccacccaggacctggagcagggggcaacctcagtccagtaaggggggacccctgcccctgtgagcagagggaatgaccaccatgtgcacatccagcagcgagactgcagccactctcagcaagcttcagagggggtgtggctgggtcaagtcgggacccagagtctgactcttggctctggagccaccttcctgagtgactcccctctctggttatgtgaaccttgattccctctgcagagcaggtttgcccctctgaggttcggactacactcctatatgtagcccccagaagacaccaggagcttcaggctggctccagggctgtggctgcatccatctcaggtacagggacaatggcttccccagcaaggccctccaggcttaatttcctacataaccccagcatcccccaactccagaggcctttctgtggaagtgtggaagtaggaaatctaaaggctcttgaggggctgacaagtgtttgattttcacaatggagttcagagaagacagcacgagtttgtgtttgcacaaggtatctggctcaagctgccccatgcctgggtttcatagctaaaggggtgtgggcccacacgtgcccatttctgggtgtatgtgtgctgctgtgattggttgtacatacaggtgcctggtagaggggaggatgttttccatgcagatgcatctattgagtcctcttacctgctttatgaaaggctccaggcctctgaaggtgactctgatactggagaagctccctactccaggtgcagtgcctctgggccctagaggctgattcagcctaaaccagtggggttggacacaagcgagaacattctgc

SEQ ID NO: 227 - DNA, 3001 bp, homo sapiens
gttgaggtcgtttttgggtatttagaaggagtggagttaaggttataaattttgtttttttttcgtaggaaggagtgtttgaggtttttgtttattttaagtagttttttttttttgattttttgtaatttaagtattttatgtggggttagaggaaagttttgttagaaggtggtatttgggtttgggtattttttttgggttttgggtaggttttaagtttttttgggtttgtttttatttttgattttattaattataatgataataatgattaggataggagtagtttttgttggggagtattgtgggttttagcgttttgtggttttgattttttgggatgaaatgggttgtttgttttttttttggagggttaattattatataattgttggtatagaaattttttggggttttgaatagttatagttatagatttttttttatgtcgattttattttttagattaagatatttttgttggaggttttgtcgtaggtatttatcggggttggagggtagtgttgtttgtagtggttggttattatggttaaggggtttttgagtttggtgaggttgtttcgtaggttttgtttgtatagttttaggcgggtttgtaggtaggtcggtttttgtggaaaatgtcgttcgtcggtgagtagtggttaagtgtttatagtggtataagaattttttattatttttttttgttgttgtttttagtttttaggagtagggtttgggaggggtataggttgggtttagttatagattttgttttgtttatggtaggtacgaatttgttttttttattgtttcgtttaggttatttttagcggtatttggagaggagtttagttttagggaaggaggtgatttttattttattatttagggagaggggggtggggttttatttggatttgttgggtgggtaagggttgtttttgaaatttttttgtgtttttttgtagttagtattgttttaataggatttggtttcggggtatagtgagcgttttaaatttatagtttttgttttatgaagtgatttttattttattatttgttttttggtgatttttggttattgaatgttaggtttgtttatggtcgtttagttgataaaggagtttatgtgattgttataggggtacggttagtagttttttgagtatttagttgttattttttttttttgtagttagttgattggagagaaagtggataattttgtgtggtgttatttaaaatggagtttttatttttattttagggtaggggtttttggaaagttatgttagagagaagtattttatttggaggttaaatatttttgagatgatttttattgttttattttgtagaaaaggaaaatgttatgttattaagttgataggcgtggttagttaggggttagttgggtggtttaggtataggtttatatttttttatttattattttagtagtagtgtttttatttaggtttaggagacgtcgggttttttggatggtatttatatgtttttagggttgcgtgttggggttgggcgagcgggcgggtgtagagatgttgtaggttatagtgtttaagagtagtaggttttgtagttatattttttagagaattttagtttttttttttgtgtattgggtttattggtaaaagagtttttaaatatatagaggaaatgattaatggtgattataaaatgttagggaggcgggggaattatttgaattgtggaattttttggtttttattagttatatatgggaacggtgagttttttttttaggtggttaggtttgggggtttttattaatgaatttttttaagaatcgatagtttatttattcgtttttttgagggttttttagttttttttgggtagtttgaatgggtttgaggttgttttttttttttgaggggtatagtttggattttttggtttggaatggttggggtggggcgtgggagatatttagatagggttttttattttgtttgtaattttaggggtttttgggtaggttatgttcgttttggtgttttattttgattttagttttttttttttttggttattgtgagagatttgagtgtgaggggagtttttatagatttgttttattgatagtttatatgggtttttatttaggatttggagtagggggtaattttagtttagtaaggggggatttttgtttttgtgagtagagggaatgattattatgtgtatatttagtagcgagattgtagttatttttagtaagttttagagggggtgtggttgggttaagtcgggatttagagtttgatttttggttttggagttatttttttgagtgatttttttttttggttatgtgaattttgattttttttgtagagtaggtttgtttttttgaggttcggattatatttttatatgtagtttttagaagatattaggagttttaggttggttttagggttgtggttgtatttattttaggtatagggataatggtttttttagtaaggttttttaggtttaattttttatataattttagtattttttaattttagaggtttttttgtggaagtgtggaagtaggaaatttaaaggtttttgaggggttgataagtgtttgatttttataatggagtttagagaagatagtacgagtttgtgtttgtataaggtatttggtttaagttgttttatgtttgggttttatagttaaaggggtgtgggtttatacgtgtttatttttgggtgtatgtgtgttgttgtgattggttgtatatataggtgtttggtagaggggaggatgttttttatgtagatgtatttattgagtttttttatttgttttatgaaaggttttaggtttttgaaggtgattttgatattggagaagttttttattttaggtgtagtgtttttgggttttagaggttgatttagtttaaattagtggggttggatataagcgagaatattttgt

SEQ ID NO: 228 - DNA, 3001 bp, homo sapiens
gttgaggttgtttttgggtatttagaaggagtggagttaaggttataaattttgttttttttttgtaggaaggagtgtttgaggtttttgtttattttaagtagttttttttttttgattttttgtaatttaagtattttatgtggggttagaggaaagttttgttagaaggtggtatttgggtttgggtattttttttgggttttgggtaggttttaagtttttttgggtttgtttttatttttgattttattaattataatgataataatgattaggataggagtagtttttgttggggagtattgtgggttttagtgttttgtggttttgattttttgggatgaaatgggttgtttgttttttttttggagggttaattattatataattgttggtatagaaattttttggggttttgaatagttatagttatagatttttttttatgttgattttattttttagattaagatatttttgttggaggttttgttgtaggtatttattggggttggagggtagtgttgtttgtagtggttggttattatggttaaggggtttttgagtttggtgaggttgttttgtaggttttgtttgtatagttttaggtgggtttgtaggtaggttggtttttgtggaaaatgttgtttgttggtgagtagtggttaagtgtttatagtggtataagaattttttattatttttttttgttgttgtttttagtttttaggagtagggtttgggaggggtataggttgggtttagttatagattttgttttgtttatggtaggtatgaatttgttttttttattgttttgtttaggttatttttagtggtatttggagaggagtttagttttagggaaggaggtgatttttattttattatttagggagaggggggtggggttttatttggatttgttgggtgggtaagggttgtttttgaaatttttttgtgtttttttgtagttagtattgttttaataggatttggttttggggtatagtgagtgttttaaatttatagtttttgttttatgaagtgatttttattttattatttgttttttggtgatttttggttattgaatgttaggtttgtttatggttgtttagttgataaaggagtttatgtgattgttataggggtatggttagtagttttttgagtatttagttgttattttttttttttgtagttagttgattggagagaaagtggataattttgtgtggtgttatttaaaatggagtttttatttttattttagggtaggggtttttggaaagttatgttagagagaagtattttatttggaggttaaatatttttgagatgatttttattgttttattttgtagaaaaggaaaatgttatgttattaagttgataggtgtggttagttaggggttagttgggtggtttaggtataggtttatatttttttatttattattttagtagtagtgtttttatttaggtttaggagatgttgggttttttggatggtatttatatgtttttagggttgtgtgttggggttgggtgagtgggtgggtgtagagatgttgtaggttatagtgtttaagagtagtaggttttgtagttatattttttagagaattttagtttttttttttgtgtattgggtttattggtaaaagagtttttaaatatatagaggaaatgattaatggtgattataaaatgttagggaggtgggggaattatttgaattgtggaattttttggtttttattagttatatatgggaatggtgagttttttttttaggtggttaggtttgggggtttttattaatgaatttttttaagaattgatagtttatttatttgtttttttgagggttttttagttttttttgggtagtttgaatgggtttgaggttgttttttttttttgaggggtatagtttggattttttggtttggaatggttggggtggggtgtgggagatatttagatagggttttttattttgtttgtaattttaggggtttttgggtaggttatgtttgttttggtgttttattttgattttagttttttttttttttggttattgtgagagatttgagtgtgaggggagtttttatagatttgttttattgatagtttatatgggtttttatttaggatttggagtagggggtaattttagtttagtaaggggggatttttgtttttgtgagtagagggaatgattattatgtgtatatttagtagtgagattgtagttatttttagtaagttttagagggggtgtggttgggttaagttgggatttagagtttgatttttggttttggagttatttttttgagtgatttttttttttggttatgtgaattttgattttttttgtagagtaggtttgtttttttgaggtttggattatatttttatatgtagtttttagaagatattaggagttttaggttggttttagggttgtggttgtatttattttaggtatagggataatggtttttttagtaaggttttttaggtttaattttttatataattttagtattttttaattttagaggtttttttgtggaagtgtggaagtaggaaatttaaaggtttttgaggggttgataagtgtttgatttttataatggagtttagagaagatagtatgagtttgtgtttgtataaggtatttggtttaagttgttttatgtttgggttttatagttaaaggggtgtgggtttatatgtgtttatttttgggtgtatgtgtgttgttgtgattggttgtatatataggtgtttggtagaggggaggatgttttttatgtagatgtatttattgagtttttttatttgttttatgaaaggttttaggtttttgaaggtgattttgatattggagaagttttttattttaggtgtagtgtttttgggttttagaggttgatttagtttaaattagtggggttggatataagtgagaatattttgt

SEQ ID NO: 229 - DNA, 3001 bp, homo sapiens
gtagaatgttttcgtttgtgtttaattttattggtttaggttgaattagtttttagggtttagaggtattgtatttggagtagggagtttttttagtattagagttatttttagaggtttggagttttttataaagtaggtaagaggatttaatagatgtatttgtatggaaaatatttttttttttattaggtatttgtatgtataattaattatagtagtatatatatatttagaaatgggtacgtgtgggtttatatttttttagttatgaaatttaggtatggggtagtttgagttagatattttgtgtaaatataaattcgtgttgttttttttgaattttattgtgaaaattaaatatttgttagttttttaagagtttttagattttttatttttatatttttatagaaaggtttttggagttgggggatgttggggttatgtaggaaattaagtttggagggttttgttggggaagttattgtttttgtatttgagatggatgtagttatagttttggagttagtttgaagtttttggtgttttttgggggttatatataggagtgtagttcgaattttagaggggtaaatttgttttgtagagggaattaaggtttatataattagagaggggagttatttaggaaggtggttttagagttaagagttagattttgggtttcgatttgatttagttatattttttttgaagtttgttgagagtggttgtagtttcgttgttggatgtgtatatggtggttattttttttgtttataggggtaggggtttttttttattggattgaggttgttttttgttttaggttttgggtgggagtttatgtgaattgttagtggggtaggtttgtgagagttttttttatatttaagttttttatagtggttagagaagaggaaggttggagttagaatgaggtattagggcgggtatagtttgtttaaaggtttttgggattataggtaggatggggagttttatttaagtgttttttacgttttattttagttattttaggttaggaagtttaaattgtgttttttagagggagggggtagttttaggtttatttagattgtttagggagggttggagagtttttaggaaggcgggtgggtgggttgtcggtttttggaaaggtttattaatgaaaatttttaagtttgattatttagggaaaaggtttatcgtttttatgtgtggttgataagggttaggagattttatagtttaggtagttttttcgtttttttggtattttgtggttattattaattattttttttgtgtatttaagagtttttttgttagtgagtttagtatatagagagaaaggttaaagttttttggaggatgtggttgtagagtttgttgtttttgggtattgtggtttgtagtatttttgtattcgttcgttcgtttagttttagtacgtagttttgggagtatgtgaatgttatttaggaggttcggcgttttttgaatttgagtagagatattgttgttgagatggtaagtgagagaatgtgggtttgtgtttaggttatttagttggtttttgattggttacgtttgttagtttgataatatgatattttttttttttatagaatgaaatagtagaagttattttagaaatgtttgatttttaggtaagatgtttttttttgatatagttttttagaagtttttgttttggggtggaggtggggattttattttagatggtattatatagggttgtttattttttttttagttagttggttgtaggaggagggggtagtaattgggtgtttaagaggttgttggtcgtgtttttatggtagttatatgagtttttttattagttgagcggttatgggtagatttagtatttaatggttaggagttattaggggataggtggtaaagtgggggttattttatgagataggagttgtgggtttggggcgtttattgtgtttcgagattaagttttgttgagatagtgttgattatagagaggtatagaggggttttaggaataatttttgtttatttagtaggtttaggtgaggttttatttttttttttttgaatgatggggtgagagttatttttttttttaaggttgggtttttttttaggtgtcgttgagggtggtttgggcggggtagtgagaagggtaggttcgtgtttgttatggatagggtagggtttatgattggatttagtttgtgttttttttaagttttatttttgggggttgggggtagtagtaaaaaggagtggtggagagtttttgtattattgtgggtatttggttattgtttatcgacgaacgatattttttataggagtcgatttgtttatagattcgtttggagttgtataagtagggtttgcggggtagttttattaagtttaagggttttttgattatgatggttagttattataagtagtattgttttttaatttcggtgagtgtttacggtagggtttttagtaggaatgttttaatttagggggtggggtcgatatggggagagatttatggttgtggttgtttaggattttagggggtttttgtgttaatagttatgtaatgattagttttttagagaggaggtagatagtttattttattttaaggagttagagttatagagcgttgaagtttatagtgttttttagtaggagttgtttttattttggttattattgttattatggttaatgaggttagaggtgagggtaaatttaaggaaatttggggtttgtttaaggtttagaggaagtgtttaggtttaagtgttattttttggtaggatttttttttggttttatatggggtgtttgaattgtagaggattaaggaagggaggttatttggaatggataaggattttaggtatttttttttgcgggaagggagtaaagtttgtggttttgattttattttttttgggtgtttagagacgattttagt

SEQ ID NO: 230 - DNA, 3001 bp, homo sapiens
gtagaatgtttttgtttgtgtttaattttattggtttaggttgaattagtttttagggtttagaggtattgtatttggagtagggagtttttttagtattagagttatttttagaggtttggagttttttataaagtaggtaagaggatttaatagatgtatttgtatggaaaatatttttttttttattaggtatttgtatgtataattaattatagtagtatatatatatttagaaatgggtatgtgtgggtttatatttttttagttatgaaatttaggtatggggtagtttgagttagatattttgtgtaaatataaatttgtgttgttttttttgaattttattgtgaaaattaaatatttgttagttttttaagagtttttagattttttatttttatatttttatagaaaggtttttggagttgggggatgttggggttatgtaggaaattaagtttggagggttttgttggggaagttattgtttttgtatttgagatggatgtagttatagttttggagttagtttgaagtttttggtgttttttgggggttatatataggagtgtagtttgaattttagaggggtaaatttgttttgtagagggaattaaggtttatataattagagaggggagttatttaggaaggtggttttagagttaagagttagattttgggttttgatttgatttagttatattttttttgaagtttgttgagagtggttgtagttttgttgttggatgtgtatatggtggttattttttttgtttataggggtaggggtttttttttattggattgaggttgttttttgttttaggttttgggtgggagtttatgtgaattgttagtggggtaggtttgtgagagttttttttatatttaagttttttatagtggttagagaagaggaaggttggagttagaatgaggtattagggtgggtatagtttgtttaaaggtttttgggattataggtaggatggggagttttatttaagtgttttttatgttttattttagttattttaggttaggaagtttaaattgtgttttttagagggagggggtagttttaggtttatttagattgtttagggagggttggagagtttttaggaaggtgggtgggtgggttgttggtttttggaaaggtttattaatgaaaatttttaagtttgattatttagggaaaaggtttattgtttttatgtgtggttgataagggttaggagattttatagtttaggtagtttttttgtttttttggtattttgtggttattattaattattttttttgtgtatttaagagtttttttgttagtgagtttagtatatagagagaaaggttaaagttttttggaggatgtggttgtagagtttgttgtttttgggtattgtggtttgtagtatttttgtatttgtttgtttgtttagttttagtatgtagttttgggagtatgtgaatgttatttaggaggtttggtgttttttgaatttgagtagagatattgttgttgagatggtaagtgagagaatgtgggtttgtgtttaggttatttagttggtttttgattggttatgtttgttagtttgataatatgatattttttttttttatagaatgaaatagtagaagttattttagaaatgtttgatttttaggtaagatgtttttttttgatatagttttttagaagtttttgttttggggtggaggtggggattttattttagatggtattatatagggttgtttattttttttttagttagttggttgtaggaggagggggtagtaattgggtgtttaagaggttgttggttgtgtttttatggtagttatatgagtttttttattagttgagtggttatgggtagatttagtatttaatggttaggagttattaggggataggtggtaaagtgggggttattttatgagataggagttgtgggtttggggtgtttattgtgttttgagattaagttttgttgagatagtgttgattatagagaggtatagaggggttttaggaataatttttgtttatttagtaggtttaggtgaggttttatttttttttttttgaatgatggggtgagagttatttttttttttaaggttgggtttttttttaggtgttgttgagggtggtttgggtggggtagtgagaagggtaggtttgtgtttgttatggatagggtagggtttatgattggatttagtttgtgttttttttaagttttatttttgggggttgggggtagtagtaaaaaggagtggtggagagtttttgtattattgtgggtatttggttattgtttattgatgaatgatattttttataggagttgatttgtttatagatttgtttggagttgtataagtagggtttgtggggtagttttattaagtttaagggttttttgattatgatggttagttattataagtagtattgttttttaattttggtgagtgtttatggtagggtttttagtaggaatgttttaatttagggggtggggttgatatggggagagatttatggttgtggttgtttaggattttagggggtttttgtgttaatagttatgtaatgattagttttttagagaggaggtagatagtttattttattttaaggagttagagttatagagtgttgaagtttatagtgttttttagtaggagttgtttttattttggttattattgttattatggttaatgaggttagaggtgagggtaaatttaaggaaatttggggtttgtttaaggtttagaggaagtgtttaggtttaagtgttattttttggtaggatttttttttggttttatatggggtgtttgaattgtagaggattaaggaagggaggttatttggaatggataaggattttaggtatttttttttgtgggaagggagtaaagtttgtggttttgattttattttttttgggtgtttagagatgattttagt

SEQ ID NO: 231 - DNA, 50 bp, homo sapiens
cggcaggatggccactgaacaagaatttagagaatatcagctgctggacc

SEQ ID NO: 232 - DNA, 50 bp, homo sapiens
cggtaggatggttattgaataagaatttagagaatattagttgttggatt

SEQ ID NO: 233 - DNA, 50 bp, homo sapiens
tggtaggatggttattgaataagaatttagagaatattagttgttggatt

SEQ ID NO: 234 - DNA, 50 bp, homo sapiens
ggtttagtagttgatattttttaaatttttgtttagtggttattttgtcg

SEQ ID NO: 235 - DNA, 50 bp, homo sapiens
ggtttagtagttgatattttttaaatttttgtttagtggttattttgttg

SEQ ID NO: 236 - DNA, 3001 bp, homo sapiens
caccctcagttatttcagtagtttaatcatcttttagttacttatgcagttcataataaatgttactagatgctctctagatgaataacattttaatttaaaaaaaattctttttaaagtcctgccattcaataagtttagcttttttttcacaatcttgtaggttgcaaacattcccttattcatgaaacacactgtaaaagttttatacgttttgctaattaaaactaaatttcaaaatgaccttccatctgcctcctgttctataaactatcccttttagaagtgtcatgcagagatctaattaaagcattaccaagaaaaacacctggctgtattgtcttaacatgtcattttcatatcattatttactgtggcataaacaacaggcacaaaaataggaactgtttttacccaaagcgcagctctcccatctctctctacatggtataatgcctcaaacatgtatacatatttaatattttccaaacaaccagcaaaagtcattttaaaaaattaaatgatgaaaatgacttaccctccgtagttcacaaagaattttttcaaaaagtctcaaaaatcaggttgatgttctcaaagaggaaatctatgcccaatgaagccactcttgtgttgatattctggacacttctctgatggtgcaggaatttaaactctgctgcagctcttcatagccaatcaacctcaggctgggggtgactgacatcacaaggtgtcaccgggaccccggtacacccacacttcctccagctggcagaggcacattttccctaaaaagctcttgtggttcccaaatgactagactagtttccattaaattgaagatcttcccaaaactttattttgatttctaaatatatgtcattcacattcaggcagtcttatgaacaatgacaatgtcttctacccaccgacagatcccagcagacccaaggatgggaaaggcggaggcaggggtgggtagaaagtttcctgttaatgtacatttccaggttgtacatggagaaagctactaaaatactagagttccttaaattgttggttttgagaatatgggcttttatttcttcctttttcctcttttaacaacctctactactcacctccttttcctctcatctccccacccccatatacacacaaagttcccaaactcctactaatctaataaagcgtccactaaagtaccccccttaagtagctattgtgttattcaagaaatttagatctaacacttaacacttaatcattccctgtttgccacattttaatgattctttgaaatcagaattggattaaggggaatactagctgggtagcatccaaggaaactaatcttgaagggactctgtgccaccactgaaaatgtaatgaaatggataaaatgatatttaccaaaacattttcgaggaagcgtactaaaagttgtagggagctggaaatgggtttggcaatttcccaggagcgtgttcaagtgacggcaggatggccactgaacaagaatttagagaatatcagctgctggaccttaatttccttaagagtagggatgtttgcttgtctactgatctataatcagtgcctggatacctagaacagttcttaataatcactcagtactctttgaatgactgagtggattggcttgaaaattagccaaactattaacttgattacagtatctgcataactcactgtaacttttaaaaaaatgctttaattgttaaaaaaaaaattgagctgatgctcctaacatggatctagaaaattagagtgcccaatttattcaggcaactaatgtcagatatatggattatcaacatatttagtgtgaactataatatgcgggggagggtggtgcagacaatgaggaaagagatgtctattttcatttagggttgattagaaagccaaagtccatatggggaagctataaattccctgtgatttgctctggttctgaattacactctctgatggtttcatgggtcttaactgagatctatgctagaagaaccttataatcttatgacagaattggattctgggcagatttgggcagattgcattacaagacattattttagactctcttcaaatccctacataaaaacagaggagcaattagataacaaaattgaaaactgtggataacatttacaataaaactaggcatttttgttatctattgctatatcaaaaaccacttcaatactttgcattttaaaacaactaccattttcttatctctcacagctagcattgtagtcatctgaagactcagttggggcagaacatttcagatgccactttcatagttgttacctgagagctcagctggagctgtaattctgagcactttagttctttacatggcctctccttggcttggccttctcacaacctgaaggctgggggccaagagttcctagaatatcatttttccatattctgttggtcaatcaatcacaaggagatctcagattcataaggagaaatactctctaccttttggtgtcagatcaggatgcacatgtatagggagcagaggaaacgttgaggtagtttttgattagttaccaccccttatgacaagttatatccactaactccaaggtgactaaggacaaagtccacaactgccacaagacctagagagtctatgcaggagtgagcggaggaaagcagcaggaaatctgatgaacatgagaacagcagaacccaaagcagtcaagaattattgctgatgggtgccaatggttcatagcacagctgaaggatctagaccagtctagcccctaaggattctaagccactacagctgctttctaagacagactcacatacaggagaaacttctgggagtggaataaaaattgcacaggatatagacaatagagaagacacagataaatatgggagaggggaatggatccaagaaatcttagaaagctgctatttttttttaacataacacgaa

SEQ ID NO: 237 - DNA, 3001 bp, homo sapiens
tatttttagttattttagtagtttaattattttttagttatttatgtagtttataataaatgttattagatgttttttagatgaataatattttaatttaaaaaaaattttttttaaagttttgttatttaataagtttagttttttttttataattttgtaggttgtaaatatttttttatttatgaaatatattgtaaaagttttatacgttttgttaattaaaattaaattttaaaatgattttttatttgttttttgttttataaattattttttttagaagtgttatgtagagatttaattaaagtattattaagaaaaatatttggttgtattgttttaatatgttatttttatattattatttattgtggtataaataataggtataaaaataggaattgtttttatttaaagcgtagtttttttatttttttttatatggtataatgttttaaatatgtatatatatttaatattttttaaataattagtaaaagttattttaaaaaattaaatgatgaaaatgatttatttttcgtagtttataaagaatttttttaaaaagttttaaaaattaggttgatgtttttaaagaggaaatttatgtttaatgaagttatttttgtgttgatattttggatatttttttgatggtgtaggaatttaaattttgttgtagttttttatagttaattaattttaggttgggggtgattgatattataaggtgttatcgggatttcggtatatttatattttttttagttggtagaggtatattttttttaaaaagtttttgtggtttttaaatgattagattagtttttattaaattgaagatttttttaaaattttattttgatttttaaatatatgttatttatatttaggtagttttatgaataatgataatgttttttatttatcgatagattttagtagatttaaggatgggaaaggcggaggtaggggtgggtagaaagttttttgttaatgtatatttttaggttgtatatggagaaagttattaaaatattagagttttttaaattgttggttttgagaatatgggtttttatttttttttttttttttttttaataatttttattatttatttttttttttttttatttttttatttttatatatatataaagtttttaaatttttattaatttaataaagcgtttattaaagtattttttttaagtagttattgtgttatttaagaaatttagatttaatatttaatatttaattattttttgtttgttatattttaatgattttttgaaattagaattggattaaggggaatattagttgggtagtatttaaggaaattaattttgaagggattttgtgttattattgaaaatgtaatgaaatggataaaatgatatttattaaaatattttcgaggaagcgtattaaaagttgtagggagttggaaatgggtttggtaattttttaggagcgtgtttaagtgacggtaggatggttattgaataagaatttagagaatattagttgttggattttaatttttttaagagtagggatgtttgtttgtttattgatttataattagtgtttggatatttagaatagtttttaataattatttagtattttttgaatgattgagtggattggtttgaaaattagttaaattattaatttgattatagtatttgtataatttattgtaatttttaaaaaaatgttttaattgttaaaaaaaaaattgagttgatgtttttaatatggatttagaaaattagagtgtttaatttatttaggtaattaatgttagatatatggattattaatatatttagtgtgaattataatatgcgggggagggtggtgtagataatgaggaaagagatgtttatttttatttagggttgattagaaagttaaagtttatatggggaagttataaattttttgtgatttgttttggttttgaattatattttttgatggttttatgggttttaattgagatttatgttagaagaattttataattttatgatagaattggattttgggtagatttgggtagattgtattataagatattattttagattttttttaaatttttatataaaaatagaggagtaattagataataaaattgaaaattgtggataatatttataataaaattaggtatttttgttatttattgttatattaaaaattattttaatattttgtattttaaaataattattatttttttattttttatagttagtattgtagttatttgaagatttagttggggtagaatattttagatgttatttttatagttgttatttgagagtttagttggagttgtaattttgagtattttagttttttatatggtttttttttggtttggtttttttataatttgaaggttgggggttaagagtttttagaatattatttttttatattttgttggttaattaattataaggagattttagatttataaggagaaatattttttattttttggtgttagattaggatgtatatgtatagggagtagaggaaacgttgaggtagtttttgattagttattattttttatgataagttatatttattaattttaaggtgattaaggataaagtttataattgttataagatttagagagtttatgtaggagtgagcggaggaaagtagtaggaaatttgatgaatatgagaatagtagaatttaaagtagttaagaattattgttgatgggtgttaatggtttatagtatagttgaaggatttagattagtttagtttttaaggattttaagttattatagttgttttttaagatagatttatatataggagaaatttttgggagtggaataaaaattgtataggatatagataatagagaagatatagataaatatgggagaggggaatggatttaagaaattttagaaagttgttatttttttttaatataatacgaa

SEQ ID NO: 238 - DNA, 3001 bp, homo sapiens
tatttttagttattttagtagtttaattattttttagttatttatgtagtttataataaatgttattagatgttttttagatgaataatattttaatttaaaaaaaattttttttaaagttttgttatttaataagtttagttttttttttataattttgtaggttgtaaatatttttttatttatgaaatatattgtaaaagttttatatgttttgttaattaaaattaaattttaaaatgattttttatttgttttttgttttataaattattttttttagaagtgttatgtagagatttaattaaagtattattaagaaaaatatttggttgtattgttttaatatgttatttttatattattatttattgtggtataaataataggtataaaaataggaattgtttttatttaaagtgtagtttttttatttttttttatatggtataatgttttaaatatgtatatatatttaatattttttaaataattagtaaaagttattttaaaaaattaaatgatgaaaatgatttattttttgtagtttataaagaatttttttaaaaagttttaaaaattaggttgatgtttttaaagaggaaatttatgtttaatgaagttatttttgtgttgatattttggatatttttttgatggtgtaggaatttaaattttgttgtagttttttatagttaattaattttaggttgggggtgattgatattataaggtgttattgggattttggtatatttatattttttttagttggtagaggtatattttttttaaaaagtttttgtggtttttaaatgattagattagtttttattaaattgaagatttttttaaaattttattttgatttttaaatatatgttatttatatttaggtagttttatgaataatgataatgttttttatttattgatagattttagtagatttaaggatgggaaaggtggaggtaggggtgggtagaaagttttttgttaatgtatatttttaggttgtatatggagaaagttattaaaatattagagttttttaaattgttggttttgagaatatgggtttttatttttttttttttttttttttaataatttttattatttatttttttttttttttatttttttatttttatatatatataaagtttttaaatttttattaatttaataaagtgtttattaaagtattttttttaagtagttattgtgttatttaagaaatttagatttaatatttaatatttaattattttttgtttgttatattttaatgattttttgaaattagaattggattaaggggaatattagttgggtagtatttaaggaaattaattttgaagggattttgtgttattattgaaaatgtaatgaaatggataaaatgatatttattaaaatatttttgaggaagtgtattaaaagttgtagggagttggaaatgggtttggtaattttttaggagtgtgtttaagtgatggtaggatggttattgaataagaatttagagaatattagttgttggattttaatttttttaagagtagggatgtttgtttgtttattgatttataattagtgtttggatatttagaatagtttttaataattatttagtattttttgaatgattgagtggattggtttgaaaattagttaaattattaatttgattatagtatttgtataatttattgtaatttttaaaaaaatgttttaattgttaaaaaaaaaattgagttgatgtttttaatatggatttagaaaattagagtgtttaatttatttaggtaattaatgttagatatatggattattaatatatttagtgtgaattataatatgtgggggagggtggtgtagataatgaggaaagagatgtttatttttatttagggttgattagaaagttaaagtttatatggggaagttataaattttttgtgatttgttttggttttgaattatattttttgatggttttatgggttttaattgagatttatgttagaagaattttataattttatgatagaattggattttgggtagatttgggtagattgtattataagatattattttagattttttttaaatttttatataaaaatagaggagtaattagataataaaattgaaaattgtggataatatttataataaaattaggtatttttgttatttattgttatattaaaaattattttaatattttgtattttaaaataattattatttttttattttttatagttagtattgtagttatttgaagatttagttggggtagaatattttagatgttatttttatagttgttatttgagagtttagttggagttgtaattttgagtattttagttttttatatggtttttttttggtttggtttttttataatttgaaggttgggggttaagagtttttagaatattatttttttatattttgttggttaattaattataaggagattttagatttataaggagaaatattttttattttttggtgttagattaggatgtatatgtatagggagtagaggaaatgttgaggtagtttttgattagttattattttttatgataagttatatttattaattttaaggtgattaaggataaagtttataattgttataagatttagagagtttatgtaggagtgagtggaggaaagtagtaggaaatttgatgaatatgagaatagtagaatttaaagtagttaagaattattgttgatgggtgttaatggtttatagtatagttgaaggatttagattagtttagtttttaaggattttaagttattatagttgttttttaagatagatttatatataggagaaatttttgggagtggaataaaaattgtataggatatagataatagagaagatatagataaatatgggagaggggaatggatttaagaaattttagaaagttgttatttttttttaatataatatgaa

SEQ ID NO: 239 - DNA, 3001 bp, homo sapiens
ttcgtgttatgttaaaaaaaaatagtagttttttaagattttttggatttattttttttttttatatttatttgtgttttttttattgtttatattttgtgtaatttttattttatttttagaagttttttttgtatgtgagtttgttttagaaagtagttgtagtggtttagaatttttaggggttagattggtttagattttttagttgtgttatgaattattggtatttattagtaataatttttgattgttttgggttttgttgtttttatgtttattagattttttgttgttttttttcgtttatttttgtatagattttttaggttttgtggtagttgtggattttgtttttagttattttggagttagtggatataatttgttataaggggtggtaattaattaaaaattattttaacgttttttttgttttttatatatgtgtattttgatttgatattaaaaggtagagagtatttttttttatgaatttgagatttttttgtgattgattgattaatagaatatggaaaaatgatattttaggaatttttggtttttagtttttaggttgtgagaaggttaagttaaggagaggttatgtaaagaattaaagtgtttagaattatagttttagttgagtttttaggtaataattatgaaagtggtatttgaaatgttttgttttaattgagtttttagatgattataatgttagttgtgagagataagaaaatggtagttgttttaaaatgtaaagtattgaagtggtttttgatatagtaatagataataaaaatgtttagttttattgtaaatgttatttatagtttttaattttgttatttaattgtttttttgtttttatgtagggatttgaagagagtttaaaataatgttttgtaatgtaatttgtttaaatttgtttagaatttaattttgttataagattataaggtttttttagtatagattttagttaagatttatgaaattattagagagtgtaatttagaattagagtaaattatagggaatttatagtttttttatatggattttggttttttaattaattttaaatgaaaatagatatttttttttttattgtttgtattattttttttcgtatattatagtttatattaaatatgttgataatttatatatttgatattagttgtttgaataaattgggtattttaattttttagatttatgttaggagtattagtttaattttttttttaataattaaagtatttttttaaaagttatagtgagttatgtagatattgtaattaagttaatagtttggttaatttttaagttaatttatttagttatttaaagagtattgagtgattattaagaattgttttaggtatttaggtattgattatagattagtagataagtaaatatttttatttttaaggaaattaaggtttagtagttgatattttttaaatttttgtttagtggttattttgtcgttatttgaatacgtttttgggaaattgttaaatttatttttagttttttataatttttagtacgttttttcgaaaatgttttggtaaatattattttatttattttattatatttttagtggtggtatagagtttttttaagattagtttttttggatgttatttagttagtattttttttaatttaattttgattttaaagaattattaaaatgtggtaaatagggaatgattaagtgttaagtgttagatttaaattttttgaataatataatagttatttaaggggggtattttagtggacgttttattagattagtaggagtttgggaattttgtgtgtatatgggggtggggagatgagaggaaaaggaggtgagtagtagaggttgttaaaagaggaaaaaggaagaaataaaagtttatatttttaaaattaataatttaaggaattttagtattttagtagttttttttatgtataatttggaaatgtatattaataggaaattttttatttatttttgttttcgttttttttatttttgggtttgttgggatttgtcggtgggtagaagatattgttattgtttataagattgtttgaatgtgaatgatatatatttagaaattaaaataaagttttgggaagatttttaatttaatggaaattagtttagttatttgggaattataagagttttttagggaaaatgtgtttttgttagttggaggaagtgtgggtgtatcggggtttcggtgatattttgtgatgttagttatttttagtttgaggttgattggttatgaagagttgtagtagagtttaaatttttgtattattagagaagtgtttagaatattaatataagagtggttttattgggtatagattttttttttgagaatattaatttgatttttgagattttttgaaaaaattttttgtgaattacggagggtaagttatttttattatttaattttttaaaatgatttttgttggttgtttggaaaatattaaatatgtatatatgtttgaggtattatattatgtagagagagatgggagagttgcgttttgggtaaaaatagtttttatttttgtgtttgttgtttatgttatagtaaataatgatatgaaaatgatatgttaagataatatagttaggtgttttttttggtaatgttttaattagatttttgtatgatatttttaaaagggatagtttatagaataggaggtagatggaaggttattttgaaatttagttttaattagtaaaacgtataaaatttttatagtgtgttttatgaataagggaatgtttgtaatttataagattgtgaaaaaaaagttaaatttattgaatggtaggattttaaaaagaattttttttaaattaaaatgttatttatttagagagtatttagtaatatttattatgaattgtataagtaattaaaagatgattaaattattgaaataattgagggtg

SEQ ID NO: 240 - DNA, 3001 bp, homo sapiens
tttgtgttatgttaaaaaaaaatagtagttttttaagattttttggatttattttttttttttatatttatttgtgttttttttattgtttatattttgtgtaatttttattttatttttagaagttttttttgtatgtgagtttgttttagaaagtagttgtagtggtttagaatttttaggggttagattggtttagattttttagttgtgttatgaattattggtatttattagtaataatttttgattgttttgggttttgttgtttttatgtttattagattttttgttgtttttttttgtttatttttgtatagattttttaggttttgtggtagttgtggattttgtttttagttattttggagttagtggatataatttgttataaggggtggtaattaattaaaaattattttaatgttttttttgttttttatatatgtgtattttgatttgatattaaaaggtagagagtatttttttttatgaatttgagatttttttgtgattgattgattaatagaatatggaaaaatgatattttaggaatttttggtttttagtttttaggttgtgagaaggttaagttaaggagaggttatgtaaagaattaaagtgtttagaattatagttttagttgagtttttaggtaataattatgaaagtggtatttgaaatgttttgttttaattgagtttttagatgattataatgttagttgtgagagataagaaaatggtagttgttttaaaatgtaaagtattgaagtggtttttgatatagtaatagataataaaaatgtttagttttattgtaaatgttatttatagtttttaattttgttatttaattgtttttttgtttttatgtagggatttgaagagagtttaaaataatgttttgtaatgtaatttgtttaaatttgtttagaatttaattttgttataagattataaggtttttttagtatagattttagttaagatttatgaaattattagagagtgtaatttagaattagagtaaattatagggaatttatagtttttttatatggattttggttttttaattaattttaaatgaaaatagatatttttttttttattgtttgtattatttttttttgtatattatagtttatattaaatatgttgataatttatatatttgatattagttgtttgaataaattgggtattttaattttttagatttatgttaggagtattagtttaattttttttttaataattaaagtatttttttaaaagttatagtgagttatgtagatattgtaattaagttaatagtttggttaatttttaagttaatttatttagttatttaaagagtattgagtgattattaagaattgttttaggtatttaggtattgattatagattagtagataagtaaatatttttatttttaaggaaattaaggtttagtagttgatattttttaaatttttgtttagtggttattttgttgttatttgaatatgtttttgggaaattgttaaatttatttttagttttttataatttttagtatgtttttttgaaaatgttttggtaaatattattttatttattttattatatttttagtggtggtatagagtttttttaagattagtttttttggatgttatttagttagtattttttttaatttaattttgattttaaagaattattaaaatgtggtaaatagggaatgattaagtgttaagtgttagatttaaattttttgaataatataatagttatttaaggggggtattttagtggatgttttattagattagtaggagtttgggaattttgtgtgtatatgggggtggggagatgagaggaaaaggaggtgagtagtagaggttgttaaaagaggaaaaaggaagaaataaaagtttatatttttaaaattaataatttaaggaattttagtattttagtagttttttttatgtataatttggaaatgtatattaataggaaattttttatttatttttgtttttgttttttttatttttgggtttgttgggatttgttggtgggtagaagatattgttattgtttataagattgtttgaatgtgaatgatatatatttagaaattaaaataaagttttgggaagatttttaatttaatggaaattagtttagttatttgggaattataagagttttttagggaaaatgtgtttttgttagttggaggaagtgtgggtgtattggggttttggtgatattttgtgatgttagttatttttagtttgaggttgattggttatgaagagttgtagtagagtttaaatttttgtattattagagaagtgtttagaatattaatataagagtggttttattgggtatagattttttttttgagaatattaatttgatttttgagattttttgaaaaaattttttgtgaattatggagggtaagttatttttattatttaattttttaaaatgatttttgttggttgtttggaaaatattaaatatgtatatatgtttgaggtattatattatgtagagagagatgggagagttgtgttttgggtaaaaatagtttttatttttgtgtttgttgtttatgttatagtaaataatgatatgaaaatgatatgttaagataatatagttaggtgttttttttggtaatgttttaattagatttttgtatgatatttttaaaagggatagtttatagaataggaggtagatggaaggttattttgaaatttagttttaattagtaaaatgtataaaatttttatagtgtgttttatgaataagggaatgtttgtaatttataagattgtgaaaaaaaagttaaatttattgaatggtaggattttaaaaagaattttttttaaattaaaatgttatttatttagagagtatttagtaatatttattatgaattgtataagtaattaaaagatgattaaattattgaaataattgagggtg

SEQ ID NO: 241 - DNA, 50 bp, homo sapiens
ctaagggaacactctttcctttgaccagtcagtgcaataaacgaacagcg

SEQ ID NO: 242 - DNA, 50 bp, homo sapiens
ttaagggaatatttttttttttgattagttagtgtaataaacgaatagcg

SEQ ID NO: 243 - DNA, 50 bp, homo sapiens
ttaagggaatatttttttttttgattagttagtgtaataaatgaatagtg

SEQ ID NO: 244 - DNA, 50 bp, homo sapiens
cgttgttcgtttattgtattgattggttaaaggaaagagtgtttttttag

SEQ ID NO: 245 - DNA, 50 bp, homo sapiens
tgttgtttgtttattgtattgattggttaaaggaaagagtgtttttttag

SEQ ID NO: 246 - DNA, 3001 bp, homo sapiens
ttggagtgtttgatgtggttcgcgccaaggcaatccccgccgccccgcgcgcctggccgagccccccgaccctcctggcgccgggaagagcactcaggtctaacaatgaaccctcgttggaggggcagcccccgaggcccacgatgctcggcccagtgctctccccgagcggcccgcagcgcgcccacgaccccgcgcggtgcgagcccacctcccgccggggctggggacggtggggagggagggtattaccggagggccgccgccgccgccgctgccgccgcgtcccagcgctggtggctgctgcagcagcccggctctgctggagggtccgtgcggcgtggtgtagaggaggctgccggcggtctgctccgcgccgggggcactggggaggagggggccggcggctacggcgccgctttggagggaggaggaacaggaggtggtggaagtgttcgtggtgaggatctggatgtacgcgcccggggcggcggcagcggcggcggcggcggcgaagccggggctggctagcagtgcccttttgtccatggaggctgcagcggcggcggcgacgacagccgccccctccccacccccggcggtcaccaggtactgctccagagcgggctggattccctttctcatctctcgctcctgctctttttagtgttatggtatattaatgtattgttttcaatttctttattatttgcagtcggagtttccaagtctctcctccttctctcctccccgcccggcgcttccgagccccctctctctcttttctttttatttttccgcaccgcacaggccccgggggccaaaaataatcggggctctggagagaggagggtcccggccgcacggatatcgggccccaagcggggatggaggcgtcgggggcggccgatgcaacggattgcgaggcggcggcggcagcccgggtgctgcggccggcagctgaaaaatggctccaggaagctgctgctgacaatgaatgaagggatacggtttacgcgccaaggtcctcccgcgaaactcggatttcccgccggcttttcaaaccatatttgcatatccccgcccctcaacccgccgaggaccgttcccacagcccattgggccgctacctccttacttcagtcccaatcatggagcagggccgcgacttgctggtttccattggctgccgtgcatcatggttaccggggcgacagggaccctatttgcataggcctccttgattggctggcagaagagcagtttttagggggtggggcaaagaatttccttctctcccacggaagaccacgcctggcctaggctccgcccctgtccccgcccgcccgccgggccggcgctactgacctgggcagggactccgcgccccgcagactcagtgtagatctagtctagagcccaagtttcgcttttggaaattgtcaaggtgactaagggaacactctttcctttgaccagtcagtgcaataaacgaacagcgcaggagatttttccagatacgtgccaaaggcaagttggaccatgcggacgatgtctggcaggtgcaaaaggagccctttaaatcgtgggcttctcccttcctgaaatccaaccaatgacgcggcgagagctgatcccgaggccggggctgatagacagaagcatgtgggcagacagaatcgtgggggcagaaggttcagcagacgcgattgcgggcaccagttaacattccagatcattcccggtaccttcattattagcctggataggggtaaagtacaaattaactcttttgtcttacaacggatattggtttgaatccagcagacattccctctggcccagaaacacccagggcagttaatcagggctaacctagaactgatctacgggtttctaatccgccaagcagtaatccgaaaaagtacacgcttcccacgatgacgtcgtgcccccaacgaacgcaggcacgcccaggcatcagcactttatatcttcagttttgtaggaagttctctgactggaagcaaacacaacgactcaaacctatcccaaagtatttttaaaatagtgtctttttttaaaaagtaaactagaaattgtcatcagaaaaatataaaatgatgtgtcaaactgactcctgaatttgttcaagtattcatgggtcttaaaattaaagcttgctcctgagattgagcaggaaaagagacccctgcaggaatgtgggggaagttatgtatgtagagactagatcataatttatagttacgtgcaaaacagctgcagaattggtgctcataggtgatgaggattgcaacaccttgagccctttcacaagatttttattactattattaatttcccaaaactcttactcagagtgctatgaaacacctgacaagatgtgtcagatcaggctaggactccttaatattttagccttgttaccttttctgaaacagatgagttaaaagttccattaaaccttgcaccaggctcaggaatattttagtcttgcattcaggctagttgaggatccatagccctaaacatttgtcgacactggtagaggtgacactatctttattttttgagacagagtcttgctgttgttgcccaggctggagtgccatggcacgatctcagctcactgcaacctctgcctcctgggttcaagcaattcttctgcctcagcttcctgagtagctgggactacaggtacgtgccaccacgcccagctaatttttgtatttttagtagagacagggtttcatcatgttggccaggctggtcttgaactcctgaccctaggagatccgcctcccttggcctcccaaagtgctgggattacaggcatgagccaccgcgcctggccagaagtgacactatctttagggcagattaagtggtactcaaagggcatgagctagaagtgtaatataccagcagcttccctgctcttgttccatcaatgttgctttcctctatggatatacctgtg

SEQ ID NO: 247 - DNA, 3001 bp, homo sapiens
ttggagtgtttgatgtggttcgcgttaaggtaattttcgtcgtttcgcgcgtttggtcgagtttttcgatttttttggcgtcgggaagagtatttaggtttaataatgaattttcgttggaggggtagttttcgaggtttacgatgttcggtttagtgtttttttcgagcggttcgtagcgcgtttacgatttcgcgcggtgcgagtttatttttcgtcggggttggggacggtggggagggagggtattatcggagggtcgtcgtcgtcgtcgttgtcgtcgcgttttagcgttggtggttgttgtagtagttcggttttgttggagggttcgtgcggcgtggtgtagaggaggttgtcggcggtttgtttcgcgtcgggggtattggggaggagggggtcggcggttacggcgtcgttttggagggaggaggaataggaggtggtggaagtgttcgtggtgaggatttggatgtacgcgttcggggcggcggtagcggcggcggcggcggcgaagtcggggttggttagtagtgtttttttgtttatggaggttgtagcggcggcggcgacgatagtcgttttttttttattttcggcggttattaggtattgttttagagcgggttggatttttttttttatttttcgtttttgttttttttagtgttatggtatattaatgtattgtttttaatttttttattatttgtagtcggagtttttaagttttttttttttttttttttttcgttcggcgttttcgagtttttttttttttttttttttttattttttcgtatcgtataggtttcgggggttaaaaataatcggggttttggagagaggagggtttcggtcgtacggatatcgggttttaagcggggatggaggcgtcgggggcggtcgatgtaacggattgcgaggcggcggcggtagttcgggtgttgcggtcggtagttgaaaaatggttttaggaagttgttgttgataatgaatgaagggatacggtttacgcgttaaggttttttcgcgaaattcggatttttcgtcggttttttaaattatatttgtatattttcgttttttaattcgtcgaggatcgtttttatagtttattgggtcgttatttttttattttagttttaattatggagtagggtcgcgatttgttggtttttattggttgtcgtgtattatggttatcggggcgatagggattttatttgtataggtttttttgattggttggtagaagagtagtttttagggggtggggtaaagaattttttttttttttacggaagattacgtttggtttaggtttcgtttttgttttcgttcgttcgtcgggtcggcgttattgatttgggtagggatttcgcgtttcgtagatttagtgtagatttagtttagagtttaagtttcgtttttggaaattgttaaggtgattaagggaatatttttttttttgattagttagtgtaataaacgaatagcgtaggagatttttttagatacgtgttaaaggtaagttggattatgcggacgatgtttggtaggtgtaaaaggagttttttaaatcgtgggtttttttttttttgaaatttaattaatgacgcggcgagagttgatttcgaggtcggggttgatagatagaagtatgtgggtagatagaatcgtgggggtagaaggtttagtagacgcgattgcgggtattagttaatattttagattattttcggtatttttattattagtttggataggggtaaagtataaattaatttttttgttttataacggatattggtttgaatttagtagatattttttttggtttagaaatatttagggtagttaattagggttaatttagaattgatttacgggtttttaattcgttaagtagtaattcgaaaaagtatacgttttttacgatgacgtcgtgtttttaacgaacgtaggtacgtttaggtattagtattttatatttttagttttgtaggaagttttttgattggaagtaaatataacgatttaaatttattttaaagtatttttaaaatagtgtttttttttaaaaagtaaattagaaattgttattagaaaaatataaaatgatgtgttaaattgatttttgaatttgtttaagtatttatgggttttaaaattaaagtttgtttttgagattgagtaggaaaagagatttttgtaggaatgtgggggaagttatgtatgtagagattagattataatttatagttacgtgtaaaatagttgtagaattggtgtttataggtgatgaggattgtaatattttgagtttttttataagatttttattattattattaattttttaaaatttttatttagagtgttatgaaatatttgataagatgtgttagattaggttaggattttttaatattttagttttgttattttttttgaaatagatgagttaaaagttttattaaattttgtattaggtttaggaatattttagttttgtatttaggttagttgaggatttatagttttaaatatttgtcgatattggtagaggtgatattatttttattttttgagatagagttttgttgttgttgtttaggttggagtgttatggtacgattttagtttattgtaatttttgttttttgggtttaagtaatttttttgttttagttttttgagtagttgggattataggtacgtgttattacgtttagttaatttttgtatttttagtagagatagggttttattatgttggttaggttggttttgaatttttgattttaggagattcgttttttttggttttttaaagtgttgggattataggtatgagttatcgcgtttggttagaagtgatattatttttagggtagattaagtggtatttaaagggtatgagttagaagtgtaatatattagtagtttttttgtttttgttttattaatgttgtttttttttatggatatatttgtg

SEQ ID NO: 248 - DNA, 3001 bp, homo sapiens
ttggagtgtttgatgtggtttgtgttaaggtaatttttgttgttttgtgtgtttggttgagttttttgatttttttggtgttgggaagagtatttaggtttaataatgaatttttgttggaggggtagtttttgaggtttatgatgtttggtttagtgttttttttgagtggtttgtagtgtgtttatgattttgtgtggtgtgagtttattttttgttggggttggggatggtggggagggagggtattattggagggttgttgttgttgttgttgttgttgtgttttagtgttggtggttgttgtagtagtttggttttgttggagggtttgtgtggtgtggtgtagaggaggttgttggtggtttgttttgtgttgggggtattggggaggagggggttggtggttatggtgttgttttggagggaggaggaataggaggtggtggaagtgtttgtggtgaggatttggatgtatgtgtttggggtggtggtagtggtggtggtggtggtgaagttggggttggttagtagtgtttttttgtttatggaggttgtagtggtggtggtgatgatagttgttttttttttatttttggtggttattaggtattgttttagagtgggttggatttttttttttattttttgtttttgttttttttagtgttatggtatattaatgtattgtttttaatttttttattatttgtagttggagtttttaagtttttttttttttttttttttttgtttggtgtttttgagtttttttttttttttttttttttatttttttgtattgtataggttttgggggttaaaaataattggggttttggagagaggagggttttggttgtatggatattgggttttaagtggggatggaggtgttgggggtggttgatgtaatggattgtgaggtggtggtggtagtttgggtgttgtggttggtagttgaaaaatggttttaggaagttgttgttgataatgaatgaagggatatggtttatgtgttaaggtttttttgtgaaatttggattttttgttggttttttaaattatatttgtatatttttgttttttaatttgttgaggattgtttttatagtttattgggttgttatttttttattttagttttaattatggagtagggttgtgatttgttggtttttattggttgttgtgtattatggttattggggtgatagggattttatttgtataggtttttttgattggttggtagaagagtagtttttagggggtggggtaaagaattttttttttttttatggaagattatgtttggtttaggttttgtttttgtttttgtttgtttgttgggttggtgttattgatttgggtagggattttgtgttttgtagatttagtgtagatttagtttagagtttaagttttgtttttggaaattgttaaggtgattaagggaatatttttttttttgattagttagtgtaataaatgaatagtgtaggagatttttttagatatgtgttaaaggtaagttggattatgtggatgatgtttggtaggtgtaaaaggagttttttaaattgtgggtttttttttttttgaaatttaattaatgatgtggtgagagttgattttgaggttggggttgatagatagaagtatgtgggtagatagaattgtgggggtagaaggtttagtagatgtgattgtgggtattagttaatattttagattatttttggtatttttattattagtttggataggggtaaagtataaattaatttttttgttttataatggatattggtttgaatttagtagatattttttttggtttagaaatatttagggtagttaattagggttaatttagaattgatttatgggtttttaatttgttaagtagtaatttgaaaaagtatatgttttttatgatgatgttgtgtttttaatgaatgtaggtatgtttaggtattagtattttatatttttagttttgtaggaagttttttgattggaagtaaatataatgatttaaatttattttaaagtatttttaaaatagtgtttttttttaaaaagtaaattagaaattgttattagaaaaatataaaatgatgtgttaaattgatttttgaatttgtttaagtatttatgggttttaaaattaaagtttgtttttgagattgagtaggaaaagagatttttgtaggaatgtgggggaagttatgtatgtagagattagattataatttatagttatgtgtaaaatagttgtagaattggtgtttataggtgatgaggattgtaatattttgagtttttttataagatttttattattattattaattttttaaaatttttatttagagtgttatgaaatatttgataagatgtgttagattaggttaggattttttaatattttagttttgttattttttttgaaatagatgagttaaaagttttattaaattttgtattaggtttaggaatattttagttttgtatttaggttagttgaggatttatagttttaaatatttgttgatattggtagaggtgatattatttttattttttgagatagagttttgttgttgttgtttaggttggagtgttatggtatgattttagtttattgtaatttttgttttttgggtttaagtaatttttttgttttagttttttgagtagttgggattataggtatgtgttattatgtttagttaatttttgtatttttagtagagatagggttttattatgttggttaggttggttttgaatttttgattttaggagatttgttttttttggttttttaaagtgttgggattataggtatgagttattgtgtttggttagaagtgatattatttttagggtagattaagtggtatttaaagggtatgagttagaagtgtaatatattagtagtttttttgtttttgttttattaatgttgtttttttttatggatatatttgtg

SEQ ID NO: 249 - DNA, 3001 bp, homo sapiens
tataggtatatttatagaggaaagtaatattgatggaataagagtagggaagttgttggtatattatatttttagtttatgttttttgagtattatttaatttgttttaaagatagtgttatttttggttaggcgcggtggtttatgtttgtaattttagtattttgggaggttaagggaggcggattttttagggttaggagtttaagattagtttggttaatatgatgaaattttgtttttattaaaaatataaaaattagttgggcgtggtggtacgtatttgtagttttagttatttaggaagttgaggtagaagaattgtttgaatttaggaggtagaggttgtagtgagttgagatcgtgttatggtattttagtttgggtaataatagtaagattttgttttaaaaaataaagatagtgttatttttattagtgtcgataaatgtttagggttatggatttttaattagtttgaatgtaagattaaaatatttttgagtttggtgtaaggtttaatggaatttttaatttatttgttttagaaaaggtaataaggttaaaatattaaggagttttagtttgatttgatatattttgttaggtgttttatagtattttgagtaagagttttgggaaattaataatagtaataaaaattttgtgaaagggtttaaggtgttgtaatttttattatttatgagtattaattttgtagttgttttgtacgtaattataaattatgatttagtttttatatatataattttttttatatttttgtaggggtttttttttttgtttaattttaggagtaagttttaattttaagatttatgaatatttgaataaatttaggagttagtttgatatattattttatatttttttgatgataatttttagtttattttttaaaaaaagatattattttaaaaatattttgggataggtttgagtcgttgtgtttgtttttagttagagaattttttataaaattgaagatataaagtgttgatgtttgggcgtgtttgcgttcgttgggggtacgacgttatcgtgggaagcgtgtattttttcggattattgtttggcggattagaaattcgtagattagttttaggttagttttgattaattgttttgggtgtttttgggttagagggaatgtttgttggatttaaattaatattcgttgtaagataaaagagttaatttgtattttatttttatttaggttaataatgaaggtatcgggaatgatttggaatgttaattggtgttcgtaatcgcgtttgttgaattttttgtttttacgattttgtttgtttatatgtttttgtttattagtttcggtttcgggattagttttcgtcgcgttattggttggattttaggaagggagaagtttacgatttaaagggttttttttgtatttgttagatatcgttcgtatggtttaatttgtttttggtacgtatttggaaaaattttttgcgttgttcgtttattgtattgattggttaaaggaaagagtgtttttttagttattttgataatttttaaaagcgaaatttgggttttagattagatttatattgagtttgcggggcgcggagtttttgtttaggttagtagcgtcggttcggcgggcgggcggggataggggcggagtttaggttaggcgtggtttttcgtgggagagaaggaaattttttgttttattttttaaaaattgtttttttgttagttaattaaggaggtttatgtaaatagggtttttgtcgtttcggtaattatgatgtacggtagttaatggaaattagtaagtcgcggttttgttttatgattgggattgaagtaaggaggtagcggtttaatgggttgtgggaacggttttcggcgggttgaggggcggggatatgtaaatatggtttgaaaagtcggcgggaaattcgagtttcgcgggaggattttggcgcgtaaatcgtatttttttatttattgttagtagtagttttttggagttattttttagttgtcggtcgtagtattcgggttgtcgtcgtcgtttcgtaattcgttgtatcggtcgttttcgacgtttttattttcgtttggggttcgatattcgtgcggtcgggatttttttttttttagagtttcgattatttttggttttcggggtttgtgcggtgcggaaaaataaaaagaaaagagagagagggggttcggaagcgtcgggcggggaggagagaaggaggagagatttggaaatttcgattgtaaataataaagaaattgaaaataatatattaatatattataatattaaaaagagtaggagcgagagatgagaaagggaatttagttcgttttggagtagtatttggtgatcgtcgggggtggggagggggcggttgtcgtcgtcgtcgtcgttgtagtttttatggataaaagggtattgttagttagtttcggtttcgtcgtcgtcgtcgtcgttgtcgtcgtttcgggcgcgtatatttagatttttattacgaatatttttattattttttgttttttttttttttaaagcggcgtcgtagtcgtcggtttttttttttttagtgttttcggcgcggagtagatcgtcggtagttttttttatattacgtcgtacggattttttagtagagtcgggttgttgtagtagttattagcgttgggacgcggcggtagcggcggcggcggcggtttttcggtaatattttttttttttatcgtttttagtttcggcgggaggtgggttcgtatcgcgcggggtcgtgggcgcgttgcgggtcgttcggggagagtattgggtcgagtatcgtgggtttcgggggttgtttttttaacgagggtttattgttagatttgagtgtttttttcggcgttaggagggtcggggggttcggttaggcgcgcggggcggcggggattgttttggcgcgaattatattaaatattttaa

SEQ ID NO: 250 - DNA, 3001 bp, homo sapiens
tataggtatatttatagaggaaagtaatattgatggaataagagtagggaagttgttggtatattatatttttagtttatgttttttgagtattatttaatttgttttaaagatagtgttatttttggttaggtgtggtggtttatgtttgtaattttagtattttgggaggttaagggaggtggattttttagggttaggagtttaagattagtttggttaatatgatgaaattttgtttttattaaaaatataaaaattagttgggtgtggtggtatgtatttgtagttttagttatttaggaagttgaggtagaagaattgtttgaatttaggaggtagaggttgtagtgagttgagattgtgttatggtattttagtttgggtaataatagtaagattttgttttaaaaaataaagatagtgttatttttattagtgttgataaatgtttagggttatggatttttaattagtttgaatgtaagattaaaatatttttgagtttggtgtaaggtttaatggaatttttaatttatttgttttagaaaaggtaataaggttaaaatattaaggagttttagtttgatttgatatattttgttaggtgttttatagtattttgagtaagagttttgggaaattaataatagtaataaaaattttgtgaaagggtttaaggtgttgtaatttttattatttatgagtattaattttgtagttgttttgtatgtaattataaattatgatttagtttttatatatataattttttttatatttttgtaggggtttttttttttgtttaattttaggagtaagttttaattttaagatttatgaatatttgaataaatttaggagttagtttgatatattattttatatttttttgatgataatttttagtttattttttaaaaaaagatattattttaaaaatattttgggataggtttgagttgttgtgtttgtttttagttagagaattttttataaaattgaagatataaagtgttgatgtttgggtgtgtttgtgtttgttgggggtatgatgttattgtgggaagtgtgtatttttttggattattgtttggtggattagaaatttgtagattagttttaggttagttttgattaattgttttgggtgtttttgggttagagggaatgtttgttggatttaaattaatatttgttgtaagataaaagagttaatttgtattttatttttatttaggttaataatgaaggtattgggaatgatttggaatgttaattggtgtttgtaattgtgtttgttgaattttttgtttttatgattttgtttgtttatatgtttttgtttattagttttggttttgggattagtttttgttgtgttattggttggattttaggaagggagaagtttatgatttaaagggttttttttgtatttgttagatattgtttgtatggtttaatttgtttttggtatgtatttggaaaaattttttgtgttgtttgtttattgtattgattggttaaaggaaagagtgtttttttagttattttgataatttttaaaagtgaaatttgggttttagattagatttatattgagtttgtggggtgtggagtttttgtttaggttagtagtgttggtttggtgggtgggtggggataggggtggagtttaggttaggtgtggttttttgtgggagagaaggaaattttttgttttattttttaaaaattgtttttttgttagttaattaaggaggtttatgtaaatagggtttttgttgttttggtaattatgatgtatggtagttaatggaaattagtaagttgtggttttgttttatgattgggattgaagtaaggaggtagtggtttaatgggttgtgggaatggtttttggtgggttgaggggtggggatatgtaaatatggtttgaaaagttggtgggaaatttgagttttgtgggaggattttggtgtgtaaattgtatttttttatttattgttagtagtagttttttggagttattttttagttgttggttgtagtatttgggttgttgttgttgttttgtaatttgttgtattggttgtttttgatgtttttatttttgtttggggtttgatatttgtgtggttgggatttttttttttttagagttttgattatttttggtttttggggtttgtgtggtgtggaaaaataaaaagaaaagagagagagggggtttggaagtgttgggtggggaggagagaaggaggagagatttggaaattttgattgtaaataataaagaaattgaaaataatatattaatatattataatattaaaaagagtaggagtgagagatgagaaagggaatttagtttgttttggagtagtatttggtgattgttgggggtggggagggggtggttgttgttgttgttgttgttgtagtttttatggataaaagggtattgttagttagttttggttttgttgttgttgttgttgttgttgttgttttgggtgtgtatatttagatttttattatgaatatttttattattttttgttttttttttttttaaagtggtgttgtagttgttggtttttttttttttagtgtttttggtgtggagtagattgttggtagttttttttatattatgttgtatggattttttagtagagttgggttgttgtagtagttattagtgttgggatgtggtggtagtggtggtggtggtggttttttggtaatattttttttttttattgtttttagttttggtgggaggtgggtttgtattgtgtggggttgtgggtgtgttgtgggttgtttggggagagtattgggttgagtattgtgggttttgggggttgtttttttaatgagggtttattgttagatttgagtgttttttttggtgttaggagggttggggggtttggttaggtgtgtggggtggtggggattgttttggtgtgaattatattaaatattttaa

SEQ ID NO: 251 - DNA, 4538 bp, homo sapiens
ctcaaggtgttgcaatcctcatcacctatgagcaccaattctgcagctgttttgcacgtaactataaattatgatctagtctctacatacataacttcccccacattcctgcaggggtctcttttcctgctcaatctcaggagcaagctttaattttaagacccatgaatacttgaacaaattcaggagtcagtttgacacatcattttatatttttctgatgacaatttctagtttactttttaaaaaaagacactattttaaaaatactttgggataggtttgagtcgttgtgtttgcttccagtcagagaacttcctacaaaactgaagatataaagtgctgatgcctgggcgtgcctgcgttcgttgggggcacgacgtcatcgtgggaagcgtgtactttttcggattactgcttggcggattagaaacccgtagatcagttctaggttagccctgattaactgccctgggtgtttctgggccagagggaatgtctgctggattcaaaccaatatccgttgtaagacaaaagagttaatttgtactttacccctatccaggctaataatgaaggtaccgggaatgatctggaatgttaactggtgcccgcaatcgcgtctgctgaaccttctgcccccacgattctgtctgcccacatgcttctgtctatcagccccggcctcgggatcagctctcgccgcgtcattggttggatttcaggaagggagaagcccacgatttaaagggctccttttgcacctgccagacatcgtccgcatggtccaacttgcctttggcacgtatctggaaaaatctcctgcgctgttcgtttattgcactgactggtcaaaggaaagagtgttcccttagtcaccttgacaatttccaaaagcgaaacttgggctctagactagatctacactgagtctgcggggcgcggagtccctgcccaggtcagtagcgccggcccggcgggcgggcggggacaggggcggagcctaggccaggcgtggtcttccgtgggagagaaggaaattctttgccccaccccctaaaaactgctcttctgccagccaatcaaggaggcctatgcaaatagggtccctgtcgccccggtaaccatgatgcacggcagccaatggaaaccagcaagtcgcggccctgctccatgattgggactgaagtaaggaggtagcggcccaatgggctgtgggaacggtcctcggcgggttgaggggcggggatatgcaaatatggtttgaaaagccggcgggaaatccgagtttcgcgggaggaccttggcgcgtaaaccgtatcccttcattcattgtcagcagcagcttcctggagccatttttcagctgccggccgcagcacccgggctgccgccgccgcctcgcaatccgttgcatcggccgcccccgacgcctccatccccgcttggggcccgatatccgtgcggccgggaccctcctctctccagagccccgattatttttggcccccggggcctgtgcggtgcggaaaaataaaaagaaaagagagagagggggctcggaagcgccgggcggggaggagagaaggaggagagacttggaaactccgactgcaaataataaagaaattgaaaacaatacattaatataccataacactaaaaagagcaggagcgagagatgagaaagggaatccagcccgctctggagcagtacctggtgaccgccgggggtggggagggggcggctgtcgtcgccgccgccgctgcagcctccatggacaaaagggcactgctagccagccccggcttcgccgccgccgccgccgctgccgccgccccgggcgcgtacatccagatcctcaccacgaacacttccaccacctcctgttcctcctccctccaaagcggcgccgtagccgccggccccctcctccccagtgcccccggcgcggagcagaccgccggcagcctcctctacaccacgccgcacggaccctccagcagagccgggctgctgcagcagccaccagcgctgggacgcggcggcagcggcggcggcggcggccctccggtaataccctccctccccaccgtccccagccccggcgggaggtgggctcgcaccgcgcggggtcgtgggcgcgctgcgggccgctcggggagagcactgggccgagcatcgtgggcctcgggggctgcccctccaacgagggttcattgttagacctgagtgctcttcccggcgccaggagggtcggggggctcggccaggcgcgcggggcggcggggattgccttggcgcgaaccacatcaaacactccaaaacttttcgcggcccccccttcttttcctgcacttttccctacccccactctcccttcccctccaactcgaagcttcctctttctcgggcgtaggaaggggtcacgccccggatggagaagggggtgggggagggagtagtgaactggggtgtggggggctctgaggggttgaaaccgggggactgttggggtgctagcccccagtcggccttggaggctcgttggcggccgggggtccctgcggcgtgctcggagcgcaggggatcggcggggctgcgcttgacacattttaggatctgtaactcccggcaacaaaggggctgggggaggtggaggggagtcgggcgtgggggaggtggggctggaagccgggtgcggactggggcgtgggctgtctggggtgaggggctcgcgggctggcgctctggcctgggcgcatcctggcagtggcagcggcggcgcccgcgtggcccaagcgcccaggccttcctcgccgggccccgggcctgcccttgacccgcctctccccttgccccttccttccccgccctgtccccctctccgccccccggcgacggagggcgggggcagctgggttcccgtcccgccgcctgggtctgtccctctctccgggacccgccggtgacgtttcgcacacgtgcgcgcaggacgcgcctgtgactggggaggaggcggcggcgggagggggcgctggagggggagaggggggcacccacttcctcctgctcgccggctccctggcctgggacggtcccggcgccctcgcacccgcccccggcaccgccaccctccctctcctctccccacccccccaccggcgcccgccctcgccctgcgccgccggtctgttcggccctccgggccccctctccagccggccccccacctccccccggagccaggctggtttcggaaatgcccttacagcagcaggttagtgaccgggacggctcgggggccgccgacgccgcgggggcaccggattctgttgggggctgaagcggtgagggtaggcggttgagcggggttttggagtgggaacggggggttgggtgctcgagggaaatgagtaagcaagaaaaatctaactaagtaaatgccccggcctccggttctaggaacctcggggcgggagtgtctgccccagggggtgggtatggtgtttacgtggattttttttctagggggcggatggatgggcgatagaaaaccggagggggcttctcgccaatggccgagttgagctctgttttctgtcttccttcccttgtgctggagggggaggggggtgggtcagagggtagggtgtctgtaggattcccaggccacccgccaccccctccctttgtccctgtaatttataaagcgcctttgagagatgatttaggtcagtatgcggcttctctttttgttggtactagaaagaagtgtggcccggaggtctcccctttctccttttctctccttcattcccttcctccatgcctccgggtcttcaccctcgtggtgaggcttggcctccacggggctagaaccgaaccagactcagttagatccatggtagcctgattataccaggcgtggacctcaccttgtctcagctccaaatgggtttaatttttggagaatcaagattttgcgggagtctttaagaaagtcagcacataggcagcactttgggaaatgggatgggtttgggaataatgaggcgttttttatttctttcctgttcccagtttctccccgggttcggtcttaactgctttccagccccagagatacttgctgggcatgtgtgatgtagtcttagtcaaagaagctcatcgttttttagtgactagggtctgccagcaggggggaaacggagcacagtacctgcttagacatagcagtatccggtgtgctgggttttcagtcgcaagaatattccatgcttttattagcttcagatactcttactgacttgacctaagcatgtttggacatattttaagcatatttgacccctgcacagttctgttactatttcataaacctaaccttaaacaaccagctattgacatacttcttggattagattcacagatttgcagggggtagttttgataatgggaaattatgagagcttcaagttgatttttaaaaaattttaacagtgtttgttgggccaggtccctaagactatctttc

SEQ ID NO: 252 - DNA, 4538 bp, homo sapiens
tttaaggtgttgtaatttttattatttatgagtattaattttgtagttgttttgtacgtaattataaattatgatttagtttttatatatataattttttttatatttttgtaggggtttttttttttgtttaattttaggagtaagttttaattttaagatttatgaatatttgaataaatttaggagttagtttgatatattattttatatttttttgatgataatttttagtttattttttaaaaaaagatattattttaaaaatattttgggataggtttgagtcgttgtgtttgtttttagttagagaattttttataaaattgaagatataaagtgttgatgtttgggcgtgtttgcgttcgttgggggtacgacgttatcgtgggaagcgtgtattttttcggattattgtttggcggattagaaattcgtagattagttttaggttagttttgattaattgttttgggtgtttttgggttagagggaatgtttgttggatttaaattaatattcgttgtaagataaaagagttaatttgtattttatttttatttaggttaataatgaaggtatcgggaatgatttggaatgttaattggtgttcgtaatcgcgtttgttgaattttttgtttttacgattttgtttgtttatatgtttttgtttattagtttcggtttcgggattagttttcgtcgcgttattggttggattttaggaagggagaagtttacgatttaaagggttttttttgtatttgttagatatcgttcgtatggtttaatttgtttttggtacgtatttggaaaaattttttgcgttgttcgtttattgtattgattggttaaaggaaagagtgtttttttagttattttgataatttttaaaagcgaaatttgggttttagattagatttatattgagtttgcggggcgcggagtttttgtttaggttagtagcgtcggttcggcgggcgggcggggataggggcggagtttaggttaggcgtggtttttcgtgggagagaaggaaattttttgttttattttttaaaaattgtttttttgttagttaattaaggaggtttatgtaaatagggtttttgtcgtttcggtaattatgatgtacggtagttaatggaaattagtaagtcgcggttttgttttatgattgggattgaagtaaggaggtagcggtttaatgggttgtgggaacggttttcggcgggttgaggggcggggatatgtaaatatggtttgaaaagtcggcgggaaattcgagtttcgcgggaggattttggcgcgtaaatcgtatttttttatttattgttagtagtagttttttggagttattttttagttgtcggtcgtagtattcgggttgtcgtcgtcgtttcgtaattcgttgtatcggtcgttttcgacgtttttattttcgtttggggttcgatattcgtgcggtcgggatttttttttttttagagtttcgattatttttggttttcggggtttgtgcggtgcggaaaaataaaaagaaaagagagagagggggttcggaagcgtcgggcggggaggagagaaggaggagagatttggaaatttcgattgtaaataataaagaaattgaaaataatatattaatatattataatattaaaaagagtaggagcgagagatgagaaagggaatttagttcgttttggagtagtatttggtgatcgtcgggggtggggagggggcggttgtcgtcgtcgtcgtcgttgtagtttttatggataaaagggtattgttagttagtttcggtttcgtcgtcgtcgtcgtcgttgtcgtcgtttcgggcgcgtatatttagatttttattacgaatatttttattattttttgttttttttttttttaaagcggcgtcgtagtcgtcggtttttttttttttagtgttttcggcgcggagtagatcgtcggtagttttttttatattacgtcgtacggattttttagtagagtcgggttgttgtagtagttattagcgttgggacgcggcggtagcggcggcggcggcggtttttcggtaatattttttttttttatcgtttttagtttcggcgggaggtgggttcgtatcgcgcggggtcgtgggcgcgttgcgggtcgttcggggagagtattgggtcgagtatcgtgggtttcgggggttgtttttttaacgagggtttattgttagatttgagtgtttttttcggcgttaggagggtcggggggttcggttaggcgcgcggggcggcggggattgttttggcgcgaattatattaaatattttaaaatttttcgcggtttttttttttttttttgtatttttttttatttttattttttttttttttttaattcgaagttttttttttttcgggcgtaggaaggggttacgtttcggatggagaagggggtgggggagggagtagtgaattggggtgtggggggttttgaggggttgaaatcgggggattgttggggtgttagtttttagtcggttttggaggttcgttggcggtcgggggtttttgcggcgtgttcggagcgtaggggatcggcggggttgcgtttgatatattttaggatttgtaattttcggtaataaaggggttgggggaggtggaggggagtcgggcgtgggggaggtggggttggaagtcgggtgcggattggggcgtgggttgtttggggtgaggggttcgcgggttggcgttttggtttgggcgtattttggtagtggtagcggcggcgttcgcgtggtttaagcgtttaggtttttttcgtcgggtttcgggtttgtttttgattcgtttttttttttgtttttttttttttcgttttgttttttttttcgtttttcggcgacggagggcgggggtagttgggttttcgtttcgtcgtttgggtttgttttttttttcgggattcgtcggtgacgtttcgtatacgtgcgcgtaggacgcgtttgtgattggggaggaggcggcggcgggagggggcgttggagggggagaggggggtatttatttttttttgttcgtcggttttttggtttgggacggtttcggcgttttcgtattcgttttcggtatcgttatttttttttttttttttttatttttttatcggcgttcgttttcgttttgcgtcgtcggtttgttcggtttttcgggttttttttttagtcggttttttattttttttcggagttaggttggtttcggaaatgtttttatagtagtaggttagtgatcgggacggttcgggggtcgtcgacgtcgcgggggtatcggattttgttgggggttgaagcggtgagggtaggcggttgagcggggttttggagtgggaacggggggttgggtgttcgagggaaatgagtaagtaagaaaaatttaattaagtaaatgtttcggttttcggttttaggaatttcggggcgggagtgtttgttttagggggtgggtatggtgtttacgtggattttttttttagggggcggatggatgggcgatagaaaatcggagggggtttttcgttaatggtcgagttgagttttgttttttgtttttttttttttgtgttggagggggaggggggtgggttagagggtagggtgtttgtaggatttttaggttattcgttattttttttttttgtttttgtaatttataaagcgtttttgagagatgatttaggttagtatgcggtttttttttttgttggtattagaaagaagtgtggttcggaggtttttttttttttttttttttttttttattttttttttttatgttttcgggtttttattttcgtggtgaggtttggtttttacggggttagaatcgaattagatttagttagatttatggtagtttgattatattaggcgtggattttattttgttttagttttaaatgggtttaatttttggagaattaagattttgcgggagtttttaagaaagttagtatataggtagtattttgggaaatgggatgggtttgggaataatgaggcgttttttattttttttttgtttttagttttttttcgggttcggttttaattgttttttagttttagagatatttgttgggtatgtgtgatgtagttttagttaaagaagtttatcgttttttagtgattagggtttgttagtaggggggaaacggagtatagtatttgtttagatatagtagtattcggtgtgttgggtttttagtcgtaagaatattttatgtttttattagttttagatatttttattgatttgatttaagtatgtttggatatattttaagtatatttgatttttgtatagttttgttattattttataaatttaattttaaataattagttattgatatattttttggattagatttatagatttgtagggggtagttttgataatgggaaattatgagagttttaagttgatttttaaaaaattttaatagtgtttgttgggttaggtttttaagattatttttt

SEQ ID NO: 253 - DNA, 4538 bp, homo sapiens
tttaaggtgttgtaatttttattatttatgagtattaattttgtagttgttttgtatgtaattataaattatgatttagtttttatatatataattttttttatatttttgtaggggtttttttttttgtttaattttaggagtaagttttaattttaagatttatgaatatttgaataaatttaggagttagtttgatatattattttatatttttttgatgataatttttagtttattttttaaaaaaagatattattttaaaaatattttgggataggtttgagttgttgtgtttgtttttagttagagaattttttataaaattgaagatataaagtgttgatgtttgggtgtgtttgtgtttgttgggggtatgatgttattgtgggaagtgtgtatttttttggattattgtttggtggattagaaatttgtagattagttttaggttagttttgattaattgttttgggtgtttttgggttagagggaatgtttgttggatttaaattaatatttgttgtaagataaaagagttaatttgtattttatttttatttaggttaataatgaaggtattgggaatgatttggaatgttaattggtgtttgtaattgtgtttgttgaattttttgtttttatgattttgtttgtttatatgtttttgtttattagttttggttttgggattagtttttgttgtgttattggttggattttaggaagggagaagtttatgatttaaagggttttttttgtatttgttagatattgtttgtatggtttaatttgtttttggtatgtatttggaaaaattttttgtgttgtttgtttattgtattgattggttaaaggaaagagtgtttttttagttattttgataatttttaaaagtgaaatttgggttttagattagatttatattgagtttgtggggtgtggagtttttgtttaggttagtagtgttggtttggtgggtgggtggggataggggtggagtttaggttaggtgtggttttttgtgggagagaaggaaattttttgttttattttttaaaaattgtttttttgttagttaattaaggaggtttatgtaaatagggtttttgttgttttggtaattatgatgtatggtagttaatggaaattagtaagttgtggttttgttttatgattgggattgaagtaaggaggtagtggtttaatgggttgtgggaatggtttttggtgggttgaggggtggggatatgtaaatatggtttgaaaagttggtgggaaatttgagttttgtgggaggattttggtgtgtaaattgtatttttttatttattgttagtagtagttttttggagttattttttagttgttggttgtagtatttgggttgttgttgttgttttgtaatttgttgtattggttgtttttgatgtttttatttttgtttggggtttgatatttgtgtggttgggatttttttttttttagagttttgattatttttggtttttggggtttgtgtggtgtggaaaaataaaaagaaaagagagagagggggtttggaagtgttgggtggggaggagagaaggaggagagatttggaaattttgattgtaaataataaagaaattgaaaataatatattaatatattataatattaaaaagagtaggagtgagagatgagaaagggaatttagtttgttttggagtagtatttggtgattgttgggggtggggagggggtggttgttgttgttgttgttgttgtagtttttatggataaaagggtattgttagttagttttggttttgttgttgttgttgttgttgttgttgttttgggtgtgtatatttagatttttattatgaatatttttattattttttgttttttttttttttaaagtggtgttgtagttgttggtttttttttttttagtgtttttggtgtggagtagattgttggtagttttttttatattatgttgtatggattttttagtagagttgggttgttgtagtagttattagtgttgggatgtggtggtagtggtggtggtggtggttttttggtaatattttttttttttattgtttttagttttggtgggaggtgggtttgtattgtgtggggttgtgggtgtgttgtgggttgtttggggagagtattgggttgagtattgtgggttttgggggttgtttttttaatgagggtttattgttagatttgagtgttttttttggtgttaggagggttggggggtttggttaggtgtgtggggtggtggggattgttttggtgtgaattatattaaatattttaaaattttttgtggtttttttttttttttttgtatttttttttatttttattttttttttttttttaatttgaagtttttttttttttgggtgtaggaaggggttatgttttggatggagaagggggtgggggagggagtagtgaattggggtgtggggggttttgaggggttgaaattgggggattgttggggtgttagtttttagttggttttggaggtttgttggtggttgggggtttttgtggtgtgtttggagtgtaggggattggtggggttgtgtttgatatattttaggatttgtaatttttggtaataaaggggttgggggaggtggaggggagttgggtgtgggggaggtggggttggaagttgggtgtggattggggtgtgggttgtttggggtgaggggtttgtgggttggtgttttggtttgggtgtattttggtagtggtagtggtggtgtttgtgtggtttaagtgtttaggttttttttgttgggttttgggtttgtttttgatttgtttttttttttgttttttttttttttgttttgtttttttttttgttttttggtgatggagggtgggggtagttgggtttttgttttgttgtttgggtttgtttttttttttgggatttgttggtgatgttttgtatatgtgtgtgtaggatgtgtttgtgattggggaggaggtggtggtgggagggggtgttggagggggagaggggggtatttatttttttttgtttgttggttttttggtttgggatggttttggtgtttttgtatttgtttttggtattgttatttttttttttttttttttatttttttattggtgtttgtttttgttttgtgttgttggtttgtttggttttttgggttttttttttagttggttttttatttttttttggagttaggttggttttggaaatgtttttatagtagtaggttagtgattgggatggtttgggggttgttgatgttgtgggggtattggattttgttgggggttgaagtggtgagggtaggtggttgagtggggttttggagtgggaatggggggttgggtgtttgagggaaatgagtaagtaagaaaaatttaattaagtaaatgttttggtttttggttttaggaattttggggtgggagtgtttgttttagggggtgggtatggtgtttatgtggattttttttttagggggtggatggatgggtgatagaaaattggagggggttttttgttaatggttgagttgagttttgttttttgtttttttttttttgtgttggagggggaggggggtgggttagagggtagggtgtttgtaggatttttaggttatttgttattttttttttttgtttttgtaatttataaagtgtttttgagagatgatttaggttagtatgtggtttttttttttgttggtattagaaagaagtgtggtttggaggtttttttttttttttttttttttttttattttttttttttatgtttttgggtttttatttttgtggtgaggtttggtttttatggggttagaattgaattagatttagttagatttatggtagtttgattatattaggtgtggattttattttgttttagttttaaatgggtttaatttttggagaattaagattttgtgggagtttttaagaaagttagtatataggtagtattttgggaaatgggatgggtttgggaataatgaggtgttttttattttttttttgtttttagtttttttttgggtttggttttaattgttttttagttttagagatatttgttgggtatgtgtgatgtagttttagttaaagaagtttattgttttttagtgattagggtttgttagtaggggggaaatggagtatagtatttgtttagatatagtagtatttggtgtgttgggtttttagttgtaagaatattttatgtttttattagttttagatatttttattgatttgatttaagtatgtttggatatattttaagtatatttgatttttgtatagttttgttattattttataaatttaattttaaataattagttattgatatattttttggattagatttatagatttgtagggggtagttttgataatgggaaattatgagagttttaagttgatttttaaaaaattttaatagtgtttgttgggttaggtttttaagattatttttt

SEQ ID NO: 254 - DNA, 4538 bp, homo sapiens
gaaagatagttttagggatttggtttaataaatattgttaaaattttttaaaaattaatttgaagtttttataattttttattattaaaattattttttgtaaatttgtgaatttaatttaagaagtatgttaatagttggttgtttaaggttaggtttatgaaatagtaatagaattgtgtaggggttaaatatgtttaaaatatgtttaaatatgtttaggttaagttagtaagagtatttgaagttaataaaagtatggaatatttttgcgattgaaaatttagtatatcggatattgttatgtttaagtaggtattgtgtttcgttttttttttgttggtagattttagttattaaaaaacgatgagtttttttgattaagattatattatatatgtttagtaagtatttttggggttggaaagtagttaagatcgaattcggggagaaattgggaataggaaagaaataaaaaacgttttattatttttaaatttattttattttttaaagtgttgtttatgtgttgatttttttaaagattttcgtaaaattttgattttttaaaaattaaatttatttggagttgagataaggtgaggtttacgtttggtataattaggttattatggatttaattgagtttggttcggttttagtttcgtggaggttaagttttattacgagggtgaagattcggaggtatggaggaagggaatgaaggagagaaaaggagaaaggggagattttcgggttatatttttttttagtattaataaaaagagaagtcgtatattgatttaaattattttttaaaggcgttttataaattatagggataaagggagggggtggcgggtggtttgggaattttatagatattttattttttgatttatttttttttttttttagtataagggaaggaagatagaaaatagagtttaattcggttattggcgagaagtttttttcggttttttatcgtttatttattcgttttttagaaaaaaaatttacgtaaatattatatttattttttggggtagatattttcgtttcgaggtttttagaatcggaggtcggggtatttatttagttagattttttttgtttatttatttttttcgagtatttaatttttcgtttttattttaaaatttcgtttaatcgtttatttttatcgttttagtttttaatagaattcggtgttttcgcggcgtcggcggttttcgagtcgtttcggttattaatttgttgttgtaagggtattttcgaaattagtttggtttcggggggaggtggggggtcggttggagagggggttcggagggtcgaatagatcggcggcgtagggcgagggcgggcgtcggtgggggggtggggagaggagagggagggtggcggtgtcgggggcgggtgcgagggcgtcgggatcgttttaggttagggagtcggcgagtaggaggaagtgggtgtttttttttttttttttagcgttttttttcgtcgtcgttttttttttagttataggcgcgttttgcgcgtacgtgtgcgaaacgttatcggcgggtttcggagagagggatagatttaggcggcgggacgggaatttagttgttttcgtttttcgtcgtcggggggcggagagggggatagggcggggaaggaaggggtaaggggagaggcgggttaagggtaggttcggggttcggcgaggaaggtttgggcgtttgggttacgcgggcgtcgtcgttgttattgttaggatgcgtttaggttagagcgttagttcgcgagttttttattttagatagtttacgttttagttcgtattcggtttttagttttattttttttacgttcgatttttttttattttttttagtttttttgttgtcgggagttatagattttaaaatgtgttaagcgtagtttcgtcgattttttgcgtttcgagtacgtcgtagggattttcggtcgttaacgagtttttaaggtcgattgggggttagtattttaatagtttttcggttttaattttttagagttttttatattttagtttattatttttttttttatttttttttttattcggggcgtgatttttttttacgttcgagaaagaggaagtttcgagttggaggggaagggagagtgggggtagggaaaagtgtaggaaaagaagggggggtcgcgaaaagttttggagtgtttgatgtggttcgcgttaaggtaattttcgtcgtttcgcgcgtttggtcgagtttttcgatttttttggcgtcgggaagagtatttaggtttaataatgaattttcgttggaggggtagttttcgaggtttacgatgttcggtttagtgtttttttcgagcggttcgtagcgcgtttacgatttcgcgcggtgcgagtttatttttcgtcggggttggggacggtggggagggagggtattatcggagggtcgtcgtcgtcgtcgttgtcgtcgcgttttagcgttggtggttgttgtagtagttcggttttgttggagggttcgtgcggcgtggtgtagaggaggttgtcggcggtttgtttcgcgtcgggggtattggggaggagggggtcggcggttacggcgtcgttttggagggaggaggaataggaggtggtggaagtgttcgtggtgaggatttggatgtacgcgttcggggcggcggtagcggcggcggcggcggcgaagtcggggttggttagtagtgtttttttgtttatggaggttgtagcggcggcggcgacgatagtcgttttttttttattttcggcggttattaggtattgttttagagcgggttggatttttttttttatttttcgtttttgttttttttagtgttatggtatattaatgtattgtttttaatttttttattatttgtagtcggagtttttaagttttttttttttttttttttttcgttcggcgttttcgagtttttttttttttttttttttttattttttcgtatcgtataggtttcgggggttaaaaataatcggggttttggagagaggagggtttcggtcgtacggatatcgggttttaagcggggatggaggcgtcgggggcggtcgatgtaacggattgcgaggcggcggcggtagttcgggtgttgcggtcggtagttgaaaaatggttttaggaagttgttgttgataatgaatgaagggatacggtttacgcgttaaggttttttcgcgaaattcggatttttcgtcggttttttaaattatatttgtatattttcgttttttaattcgtcgaggatcgtttttatagtttattgggtcgttatttttttattttagttttaattatggagtagggtcgcgatttgttggtttttattggttgtcgtgtattatggttatcggggcgatagggattttatttgtataggtttttttgattggttggtagaagagtagtttttagggggtggggtaaagaattttttttttttttacggaagattacgtttggtttaggtttcgtttttgttttcgttcgttcgtcgggtcggcgttattgatttgggtagggatttcgcgtttcgtagatttagtgtagatttagtttagagtttaagtttcgtttttggaaattgttaaggtgattaagggaatatttttttttttgattagttagtgtaataaacgaatagcgtaggagatttttttagatacgtgttaaaggtaagttggattatgcggacgatgtttggtaggtgtaaaaggagttttttaaatcgtgggtttttttttttttgaaatttaattaatgacgcggcgagagttgatttcgaggtcggggttgatagatagaagtatgtgggtagatagaatcgtgggggtagaaggtttagtagacgcgattgcgggtattagttaatattttagattattttcggtatttttattattagtttggataggggtaaagtataaattaatttttttgttttataacggatattggtttgaatttagtagatattttttttggtttagaaatatttagggtagttaattagggttaatttagaattgatttacgggtttttaattcgttaagtagtaattcgaaaaagtatacgttttttacgatgacgtcgtgtttttaacgaacgtaggtacgtttaggtattagtattttatatttttagttttgtaggaagttttttgattggaagtaaatataacgatttaaatttattttaaagtatttttaaaatagtgtttttttttaaaaagtaaattagaaattgttattagaaaaatataaaatgatgtgttaaattgatttttgaatttgtttaagtatttatgggttttaaaattaaagtttgtttttgagattgagtaggaaaagagatttttgtaggaatgtgggggaagttatgtatgtagagattagattataatttatagttacgtgtaaaatagttgtagaattggtgtttataggtgatgaggattgtaatattttgag

SEQ ID NO: 255 - DNA, 4538 bp, homo sapiens
gaaagatagttttagggatttggtttaataaatattgttaaaattttttaaaaattaatttgaagtttttataattttttattattaaaattattttttgtaaatttgtgaatttaatttaagaagtatgttaatagttggttgtttaaggttaggtttatgaaatagtaatagaattgtgtaggggttaaatatgtttaaaatatgtttaaatatgtttaggttaagttagtaagagtatttgaagttaataaaagtatggaatatttttgtgattgaaaatttagtatattggatattgttatgtttaagtaggtattgtgttttgttttttttttgttggtagattttagttattaaaaaatgatgagtttttttgattaagattatattatatatgtttagtaagtatttttggggttggaaagtagttaagattgaatttggggagaaattgggaataggaaagaaataaaaaatgttttattatttttaaatttattttattttttaaagtgttgtttatgtgttgatttttttaaagatttttgtaaaattttgattttttaaaaattaaatttatttggagttgagataaggtgaggtttatgtttggtataattaggttattatggatttaattgagtttggtttggttttagttttgtggaggttaagttttattatgagggtgaagatttggaggtatggaggaagggaatgaaggagagaaaaggagaaaggggagatttttgggttatatttttttttagtattaataaaaagagaagttgtatattgatttaaattattttttaaaggtgttttataaattatagggataaagggagggggtggtgggtggtttgggaattttatagatattttattttttgatttatttttttttttttttagtataagggaaggaagatagaaaatagagtttaatttggttattggtgagaagttttttttggttttttattgtttatttatttgttttttagaaaaaaaatttatgtaaatattatatttattttttggggtagatatttttgttttgaggtttttagaattggaggttggggtatttatttagttagattttttttgtttatttattttttttgagtatttaattttttgtttttattttaaaattttgtttaattgtttatttttattgttttagtttttaatagaatttggtgtttttgtggtgttggtggtttttgagttgttttggttattaatttgttgttgtaagggtatttttgaaattagtttggttttggggggaggtggggggttggttggagagggggtttggagggttgaatagattggtggtgtagggtgagggtgggtgttggtgggggggtggggagaggagagggagggtggtggtgttgggggtgggtgtgagggtgttgggattgttttaggttagggagttggtgagtaggaggaagtgggtgtttttttttttttttttagtgtttttttttgttgttgttttttttttagttataggtgtgttttgtgtgtatgtgtgtgaaatgttattggtgggttttggagagagggatagatttaggtggtgggatgggaatttagttgtttttgttttttgttgttggggggtggagagggggatagggtggggaaggaaggggtaaggggagaggtgggttaagggtaggtttggggtttggtgaggaaggtttgggtgtttgggttatgtgggtgttgttgttgttattgttaggatgtgtttaggttagagtgttagtttgtgagttttttattttagatagtttatgttttagtttgtatttggtttttagttttattttttttatgtttgatttttttttattttttttagtttttttgttgttgggagttatagattttaaaatgtgttaagtgtagttttgttgattttttgtgttttgagtatgttgtagggatttttggttgttaatgagtttttaaggttgattgggggttagtattttaatagttttttggttttaattttttagagttttttatattttagtttattatttttttttttatttttttttttatttggggtgtgatttttttttatgtttgagaaagaggaagttttgagttggaggggaagggagagtgggggtagggaaaagtgtaggaaaagaagggggggttgtgaaaagttttggagtgtttgatgtggtttgtgttaaggtaatttttgttgttttgtgtgtttggttgagttttttgatttttttggtgttgggaagagtatttaggtttaataatgaatttttgttggaggggtagtttttgaggtttatgatgtttggtttagtgttttttttgagtggtttgtagtgtgtttatgattttgtgtggtgtgagtttattttttgttggggttggggatggtggggagggagggtattattggagggttgttgttgttgttgttgttgttgtgttttagtgttggtggttgttgtagtagtttggttttgttggagggtttgtgtggtgtggtgtagaggaggttgttggtggtttgttttgtgttgggggtattggggaggagggggttggtggttatggtgttgttttggagggaggaggaataggaggtggtggaagtgtttgtggtgaggatttggatgtatgtgtttggggtggtggtagtggtggtggtggtggtgaagttggggttggttagtagtgtttttttgtttatggaggttgtagtggtggtggtgatgatagttgttttttttttatttttggtggttattaggtattgttttagagtgggttggatttttttttttattttttgtttttgttttttttagtgttatggtatattaatgtattgtttttaatttttttattatttgtagttggagtttttaagtttttttttttttttttttttttgtttggtgtttttgagtttttttttttttttttttttttatttttttgtattgtataggttttgggggttaaaaataattggggttttggagagaggagggttttggttgtatggatattgggttttaagtggggatggaggtgttgggggtggttgatgtaatggattgtgaggtggtggtggtagtttgggtgttgtggttggtagttgaaaaatggttttaggaagttgttgttgataatgaatgaagggatatggtttatgtgttaaggtttttttgtgaaatttggattttttgttggttttttaaattatatttgtatatttttgttttttaatttgttgaggattgtttttatagtttattgggttgttatttttttattttagttttaattatggagtagggttgtgatttgttggtttttattggttgttgtgtattatggttattggggtgatagggattttatttgtataggtttttttgattggttggtagaagagtagtttttagggggtggggtaaagaattttttttttttttatggaagattatgtttggtttaggttttgtttttgtttttgtttgtttgttgggttggtgttattgatttgggtagggattttgtgttttgtagatttagtgtagatttagtttagagtttaagttttgtttttggaaattgttaaggtgattaagggaatatttttttttttgattagttagtgtaataaatgaatagtgtaggagatttttttagatatgtgttaaaggtaagttggattatgtggatgatgtttggtaggtgtaaaaggagttttttaaattgtgggtttttttttttttgaaatttaattaatgatgtggtgagagttgattttgaggttggggttgatagatagaagtatgtgggtagatagaattgtgggggtagaaggtttagtagatgtgattgtgggtattagttaatattttagattatttttggtatttttattattagtttggataggggtaaagtataaattaatttttttgttttataatggatattggtttgaatttagtagatattttttttggtttagaaatatttagggtagttaattagggttaatttagaattgatttatgggtttttaatttgttaagtagtaatttgaaaaagtatatgttttttatgatgatgttgtgtttttaatgaatgtaggtatgtttaggtattagtattttatatttttagttttgtaggaagttttttgattggaagtaaatataatgatttaaatttattttaaagtatttttaaaatagtgtttttttttaaaaagtaaattagaaattgttattagaaaaatataaaatgatgtgttaaattgatttttgaatttgtttaagtatttatgggttttaaaattaaagtttgtttttgagattgagtaggaaaagagatttttgtaggaatgtgggggaagttatgtatgtagagattagattataatttatagttatgtgtaaaatagttgtagaattggtgtttataggtgatgaggattgtaatattttgag

SEQ ID NO: 256 - DNA, 50 bp, homo sapiens
cgcccctcactcaccagggcgcagacctaggcccagctcctgctcccggg

SEQ ID NO: 257 - DNA, 50 bp, homo sapiens
cgttttttatttattagggcgtagatttaggtttagtttttgttttcggg

SEQ ID NO: 258 - DNA, 50 bp, homo sapiens
tgttttttatttattagggtgtagatttaggtttagtttttgtttttggg

SEQ ID NO: 259 - DNA, 50 bp, homo sapiens
ttcgggagtaggagttgggtttaggtttgcgttttggtgagtgaggggcg

SEQ ID NO: 260 - DNA, 50 bp, homo sapiens
tttgggagtaggagttgggtttaggtttgtgttttggtgagtgaggggtg

SEQ ID NO: 261 - DNA, 3001 bp, homo sapiens
accctgcatctatttatttggtaaatatttatattgcctggccctgtgtgagatgctagagatactacatgaagcaaaaccgacactatcttcttcgtggaccttacaatctggtgggatggacagagaaatatcaatacttttgtaaataaatgtaaaattgcagttgtgcaagtgttgttaaggacaagtacccagggtgataaacgtggggtactggtcgaaaagtcagggacagggatgcctcccctgcagaagtgatgcttaagcggagatctgaaggatgaagaagagtttacaagactaagccaggggaggaagagcagaccagggaggaggaatactaaataaaaggccccaaggaaggcaggagcttgggatgtagaaggaacagaaagaggccagtgtgtggagagcactgagcaagcggacggacgagtagacagacttgggagaggtcagcgggaccggatctccagggcctgggtgaggttctggatctgaccctacaaaggggtgggacgccgggccagtttcatgccctaagcatccagatctgctctgcatttctcggctgggcgcggtggctcacgcctgtaatcccagcactctgggaggccgagacgggcggatcacttgaggtcaggagttcgagaccagcctaacacggtgaaaccccgtctctactaaaaatacaaaaattagctgggcgtggtggcaggcgcccgtaatcccagctacttgggaggctgaggcaggagaatagctggaacctgggaggcggaggttgctgtgagccgagatcgcgccattgcactccagcctgggcggcagagcgagactccgtctcggaaaggtttcaaaaaaaaaggaaaggtttctctgggcacggtgcaaggccgacaggagaagggcccctgtgcctgcgcagggcagaccagttaacacactgcaactgcccaggcaggaagcgagaggggcctgaactcaagggtgagcgcaggaggtggaaagtacatgcaccggggtgctactgagccagcaggatccacggggcggactggtggacgcgggcagccgggtccaggttgagcatgaccccgggctttcaactcgtgcgggcccgccccgagcgctctccggcttcttcccagccctctccttgccgcccctccccgatcttcccacccaacgcctccctccttctccctccgaccgctgcccagcccagcccccgtgcctgactgcctggcccgccctcttccgccacgcgacgccccttctgggtccaggacccggtctctcctcccttcctaaggccccggcagggccgccacccctcgggggcctgacgagccggcgcggtccagcccaggcccgccctctcagcccctcagcctccggagcagacgctagccgcaacgctcggcccggcctctcttccctgcgtctttcgggccgggcccctctccaccgcctgccgcgccccgacccccagggcgcccctcactcaccagggcgcagacctaggcccagctcctgctcccgggtctccgctcggcggctcctccagcctccgcccgccccgccttcttgggaccccgccccgcacaggccgggcccggcttctattgctccgactcgccgtcacgctgaagtctctttcttcaattaggttgcttgtctgtcactcaagaaggggcgggcacagctgccggtagaggggaaaaacgccggccgtccccgcccccctagtggaggcctcttaaagaaacaggacgccattcccctgcgggctacagggtctgaaggaaggtaatttcccagctaacccaagaggcagctttctttttcccccaaacttttttttctttttggtatgcagtcctagagtgaaggaaaaggcttttgctcgctgtgtcaaatcataggttgtgagctctaagcgggcctctggtggcactccgccctgtgcccagcgggcacttaccgcacactcaacagtggggatagctgtggtttggggaactgagtgggaggtgacagtcgtgtcagaggctgtgagcagccgcgctgctcaccaccgagttggagctaattataccggcacccagggctgaccgtgggcgctgagcagaggcagaagggtacaactcagctgtgctgttggaagggatccgtgggaggtggcattcgtcactgcacctgcggatcggaacaaggccgggcaccgcgccaaggactcactcctgctgtctctcttcatgctcacagcagccgtgtgatggagggagcaccgtgatcccttcgctgcagatgaggaaactgaggctcagagagggtccgagatcttacagctggtgaggggcagagcaagatgccaacctatgcctgttggattccaaagtttatactttaatcgtttgtctagcagattcttacaacaatcctgggaggtgtgtattcagctgtccctttgcagataaagaaactgatactcagcaaagagacgatgtagtgactaccacttgtaggccactgcgcagtctgcaaagcagttttacatacgttgtttcatttgatcctcgaaacatcttggaattaaagatgatttttgttagtcctattttacaggtgaataaagtgaggcttggggaggttgaggcttagccatagctaacattgctaaaactctggcaggagttactctttctccttctcactggctggacccagccttgaccttgtgatgatgatgacgacgtgctagggaacagagctacagcacaggaggtgccaaatgctacctgcctacttgggacactcacttcatactcttatgtgaaagcgaaatgatcttctccgttccttttattattaactttgatagcagggagggctgtttgagccaaccctgcactcacacaacactgaggaagaaaggcttaaattttgtaccctgggtgcctcagtttgcttcatcctagtcctggctctgctt

SEQ ID NO: 262 - DNA, 3001 bp, homo sapiens
attttgtatttatttatttggtaaatatttatattgtttggttttgtgtgagatgttagagatattatatgaagtaaaatcgatattatttttttcgtggattttataatttggtgggatggatagagaaatattaatatttttgtaaataaatgtaaaattgtagttgtgtaagtgttgttaaggataagtatttagggtgataaacgtggggtattggtcgaaaagttagggatagggatgttttttttgtagaagtgatgtttaagcggagatttgaaggatgaagaagagtttataagattaagttaggggaggaagagtagattagggaggaggaatattaaataaaaggttttaaggaaggtaggagtttgggatgtagaaggaatagaaagaggttagtgtgtggagagtattgagtaagcggacggacgagtagatagatttgggagaggttagcgggatcggatttttagggtttgggtgaggttttggatttgattttataaaggggtgggacgtcgggttagttttatgttttaagtatttagatttgttttgtatttttcggttgggcgcggtggtttacgtttgtaattttagtattttgggaggtcgagacgggcggattatttgaggttaggagttcgagattagtttaatacggtgaaatttcgtttttattaaaaatataaaaattagttgggcgtggtggtaggcgttcgtaattttagttatttgggaggttgaggtaggagaatagttggaatttgggaggcggaggttgttgtgagtcgagatcgcgttattgtattttagtttgggcggtagagcgagatttcgtttcggaaaggttttaaaaaaaaaggaaaggtttttttgggtacggtgtaaggtcgataggagaagggtttttgtgtttgcgtagggtagattagttaatatattgtaattgtttaggtaggaagcgagaggggtttgaatttaagggtgagcgtaggaggtggaaagtatatgtatcggggtgttattgagttagtaggatttacggggcggattggtggacgcgggtagtcgggtttaggttgagtatgatttcgggtttttaattcgtgcgggttcgtttcgagcgtttttcggtttttttttagttttttttttgtcgttttttttcgatttttttatttaacgttttttttttttttttttcgatcgttgtttagtttagttttcgtgtttgattgtttggttcgttttttttcgttacgcgacgttttttttgggtttaggattcggttttttttttttttttaaggtttcggtagggtcgttatttttcgggggtttgacgagtcggcgcggtttagtttaggttcgtttttttagttttttagttttcggagtagacgttagtcgtaacgttcggttcggttttttttttttgcgtttttcgggtcgggtttttttttatcgtttgtcgcgtttcgatttttagggcgttttttatttattagggcgtagatttaggtttagtttttgttttcgggttttcgttcggcggtttttttagttttcgttcgtttcgtttttttgggatttcgtttcgtataggtcgggttcggtttttattgtttcgattcgtcgttacgttgaagtttttttttttaattaggttgtttgtttgttatttaagaaggggcgggtatagttgtcggtagaggggaaaaacgtcggtcgttttcgtttttttagtggaggttttttaaagaaataggacgttatttttttgcgggttatagggtttgaaggaaggtaattttttagttaatttaagaggtagtttttttttttttttaaatttttttttttttttggtatgtagttttagagtgaaggaaaaggtttttgttcgttgtgttaaattataggttgtgagttttaagcgggtttttggtggtatttcgttttgtgtttagcgggtatttatcgtatatttaatagtggggatagttgtggtttggggaattgagtgggaggtgatagtcgtgttagaggttgtgagtagtcgcgttgtttattatcgagttggagttaattatatcggtatttagggttgatcgtgggcgttgagtagaggtagaagggtataatttagttgtgttgttggaagggattcgtgggaggtggtattcgttattgtatttgcggatcggaataaggtcgggtatcgcgttaaggatttatttttgttgtttttttttatgtttatagtagtcgtgtgatggagggagtatcgtgattttttcgttgtagatgaggaaattgaggtttagagagggttcgagattttatagttggtgaggggtagagtaagatgttaatttatgtttgttggattttaaagtttatattttaatcgtttgtttagtagatttttataataattttgggaggtgtgtatttagttgtttttttgtagataaagaaattgatatttagtaaagagacgatgtagtgattattatttgtaggttattgcgtagtttgtaaagtagttttatatacgttgttttatttgattttcgaaatattttggaattaaagatgatttttgttagttttattttataggtgaataaagtgaggtttggggaggttgaggtttagttatagttaatattgttaaaattttggtaggagttatttttttttttttttattggttggatttagttttgattttgtgatgatgatgacgacgtgttagggaatagagttatagtataggaggtgttaaatgttatttgtttatttgggatatttattttatatttttatgtgaaagcgaaatgatttttttcgttttttttattattaattttgatagtagggagggttgtttgagttaattttgtatttatataatattgaggaagaaaggtttaaattttgtattttgggtgttttagtttgttttattttagttttggttttgttt

SEQ ID NO: 263 - DNA, 3001 bp, homo sapiens
attttgtatttatttatttggtaaatatttatattgtttggttttgtgtgagatgttagagatattatatgaagtaaaattgatattattttttttgtggattttataatttggtgggatggatagagaaatattaatatttttgtaaataaatgtaaaattgtagttgtgtaagtgttgttaaggataagtatttagggtgataaatgtggggtattggttgaaaagttagggatagggatgttttttttgtagaagtgatgtttaagtggagatttgaaggatgaagaagagtttataagattaagttaggggaggaagagtagattagggaggaggaatattaaataaaaggttttaaggaaggtaggagtttgggatgtagaaggaatagaaagaggttagtgtgtggagagtattgagtaagtggatggatgagtagatagatttgggagaggttagtgggattggatttttagggtttgggtgaggttttggatttgattttataaaggggtgggatgttgggttagttttatgttttaagtatttagatttgttttgtattttttggttgggtgtggtggtttatgtttgtaattttagtattttgggaggttgagatgggtggattatttgaggttaggagtttgagattagtttaatatggtgaaattttgtttttattaaaaatataaaaattagttgggtgtggtggtaggtgtttgtaattttagttatttgggaggttgaggtaggagaatagttggaatttgggaggtggaggttgttgtgagttgagattgtgttattgtattttagtttgggtggtagagtgagattttgttttggaaaggttttaaaaaaaaaggaaaggtttttttgggtatggtgtaaggttgataggagaagggtttttgtgtttgtgtagggtagattagttaatatattgtaattgtttaggtaggaagtgagaggggtttgaatttaagggtgagtgtaggaggtggaaagtatatgtattggggtgttattgagttagtaggatttatggggtggattggtggatgtgggtagttgggtttaggttgagtatgattttgggtttttaatttgtgtgggtttgttttgagtgttttttggtttttttttagttttttttttgttgtttttttttgatttttttatttaatgtttttttttttttttttttgattgttgtttagtttagtttttgtgtttgattgtttggtttgtttttttttgttatgtgatgttttttttgggtttaggatttggttttttttttttttttaaggttttggtagggttgttattttttgggggtttgatgagttggtgtggtttagtttaggtttgtttttttagttttttagtttttggagtagatgttagttgtaatgtttggtttggttttttttttttgtgttttttgggttgggtttttttttattgtttgttgtgttttgatttttagggtgttttttatttattagggtgtagatttaggtttagtttttgtttttgggtttttgtttggtggtttttttagtttttgtttgttttgtttttttgggattttgttttgtataggttgggtttggtttttattgttttgatttgttgttatgttgaagtttttttttttaattaggttgtttgtttgttatttaagaaggggtgggtatagttgttggtagaggggaaaaatgttggttgtttttgtttttttagtggaggttttttaaagaaataggatgttatttttttgtgggttatagggtttgaaggaaggtaattttttagttaatttaagaggtagtttttttttttttttaaatttttttttttttttggtatgtagttttagagtgaaggaaaaggtttttgtttgttgtgttaaattataggttgtgagttttaagtgggtttttggtggtattttgttttgtgtttagtgggtatttattgtatatttaatagtggggatagttgtggtttggggaattgagtgggaggtgatagttgtgttagaggttgtgagtagttgtgttgtttattattgagttggagttaattatattggtatttagggttgattgtgggtgttgagtagaggtagaagggtataatttagttgtgttgttggaagggatttgtgggaggtggtatttgttattgtatttgtggattggaataaggttgggtattgtgttaaggatttatttttgttgtttttttttatgtttatagtagttgtgtgatggagggagtattgtgatttttttgttgtagatgaggaaattgaggtttagagagggtttgagattttatagttggtgaggggtagagtaagatgttaatttatgtttgttggattttaaagtttatattttaattgtttgtttagtagatttttataataattttgggaggtgtgtatttagttgtttttttgtagataaagaaattgatatttagtaaagagatgatgtagtgattattatttgtaggttattgtgtagtttgtaaagtagttttatatatgttgttttatttgatttttgaaatattttggaattaaagatgatttttgttagttttattttataggtgaataaagtgaggtttggggaggttgaggtttagttatagttaatattgttaaaattttggtaggagttatttttttttttttttattggttggatttagttttgattttgtgatgatgatgatgatgtgttagggaatagagttatagtataggaggtgttaaatgttatttgtttatttgggatatttattttatatttttatgtgaaagtgaaatgattttttttgttttttttattattaattttgatagtagggagggttgtttgagttaattttgtatttatataatattgaggaagaaaggtttaaattttgtattttgggtgttttagtttgttttattttagttttggttttgttt

SEQ ID NO: 264 - DNA, 3001 bp, homo sapiens
aagtagagttaggattaggatgaagtaaattgaggtatttagggtataaaatttaagttttttttttttagtgttgtgtgagtgtagggttggtttaaatagttttttttgttattaaagttaataataaaaggaacggagaagattatttcgtttttatataagagtatgaagtgagtgttttaagtaggtaggtagtatttggtattttttgtgttgtagttttgttttttagtacgtcgttattattattataaggttaaggttgggtttagttagtgagaaggagaaagagtaatttttgttagagttttagtaatgttagttatggttaagttttaatttttttaagttttattttatttatttgtaaaataggattaataaaaattatttttaattttaagatgtttcgaggattaaatgaaataacgtatgtaaaattgttttgtagattgcgtagtggtttataagtggtagttattatatcgtttttttgttgagtattagtttttttatttgtaaagggatagttgaatatatattttttaggattgttgtaagaatttgttagataaacgattaaagtataaattttggaatttaataggtataggttggtattttgttttgttttttattagttgtaagatttcggattttttttgagttttagtttttttatttgtagcgaagggattacggtgttttttttattatacggttgttgtgagtatgaagagagatagtaggagtgagtttttggcgcggtgttcggttttgtttcgattcgtaggtgtagtgacgaatgttattttttacggattttttttaatagtatagttgagttgtatttttttgtttttgtttagcgtttacggttagttttgggtgtcggtataattagttttaattcggtggtgagtagcgcggttgtttatagtttttgatacgattgttattttttatttagttttttaaattatagttatttttattgttgagtgtgcggtaagtgttcgttgggtatagggcggagtgttattagaggttcgtttagagtttataatttatgatttgatatagcgagtaaaagtttttttttttattttaggattgtatattaaaaagaaaaaaaagtttgggggaaaaagaaagttgttttttgggttagttgggaaattatttttttttagattttgtagttcgtaggggaatggcgttttgtttttttaagaggtttttattaggggggcggggacggtcggcgttttttttttttatcggtagttgtgttcgtttttttttgagtgatagataagtaatttaattgaagaaagagattttagcgtgacggcgagtcggagtaatagaagtcgggttcggtttgtgcggggcggggttttaagaaggcggggcgggcggaggttggaggagtcgtcgagcggagattcgggagtaggagttgggtttaggtttgcgttttggtgagtgaggggcgttttgggggtcggggcgcggtaggcggtggagaggggttcggttcgaaagacgtagggaagagaggtcgggtcgagcgttgcggttagcgtttgtttcggaggttgaggggttgagagggcgggtttgggttggatcgcgtcggttcgttaggttttcgaggggtggcggttttgtcggggttttaggaagggaggagagatcgggttttggatttagaaggggcgtcgcgtggcggaagagggcgggttaggtagttaggtacgggggttgggttgggtagcggtcggagggagaaggagggaggcgttgggtgggaagatcggggaggggcggtaaggagagggttgggaagaagtcggagagcgttcggggcgggttcgtacgagttgaaagttcggggttatgtttaatttggattcggttgttcgcgtttattagttcgtttcgtggattttgttggtttagtagtatttcggtgtatgtattttttattttttgcgtttatttttgagtttaggtttttttcgttttttgtttgggtagttgtagtgtgttaattggtttgttttgcgtaggtataggggttttttttttgtcggttttgtatcgtgtttagagaaattttttttttttttttgaaattttttcgagacggagtttcgttttgtcgtttaggttggagtgtaatggcgcgatttcggtttatagtaattttcgttttttaggttttagttatttttttgttttagttttttaagtagttgggattacgggcgtttgttattacgtttagttaatttttgtatttttagtagagacggggttttatcgtgttaggttggtttcgaatttttgattttaagtgattcgttcgtttcggttttttagagtgttgggattataggcgtgagttatcgcgtttagtcgagaaatgtagagtagatttggatgtttagggtatgaaattggttcggcgttttatttttttgtagggttagatttagaattttatttaggttttggagattcggtttcgttgattttttttaagtttgtttattcgttcgttcgtttgtttagtgttttttatatattggtttttttttgttttttttatattttaagtttttgttttttttggggttttttatttagtattttttttttttggtttgtttttttttttttggtttagttttgtaaatttttttttattttttagattttcgtttaagtattatttttgtaggggaggtatttttgtttttgatttttcgattagtattttacgtttattattttgggtatttgtttttaataatatttgtataattgtaattttatatttatttataaaagtattgatatttttttgtttattttattagattgtaaggtttacgaagaagatagtgtcggttttgttttatgtagtatttttagtattttatatagggttaggtaatataaatatttattaaataaatagatgtagggt

SEQ ID NO: 265 - DNA, 3001 bp, homo sapiens
aagtagagttaggattaggatgaagtaaattgaggtatttagggtataaaatttaagttttttttttttagtgttgtgtgagtgtagggttggtttaaatagttttttttgttattaaagttaataataaaaggaatggagaagattattttgtttttatataagagtatgaagtgagtgttttaagtaggtaggtagtatttggtattttttgtgttgtagttttgttttttagtatgttgttattattattataaggttaaggttgggtttagttagtgagaaggagaaagagtaatttttgttagagttttagtaatgttagttatggttaagttttaatttttttaagttttattttatttatttgtaaaataggattaataaaaattatttttaattttaagatgttttgaggattaaatgaaataatgtatgtaaaattgttttgtagattgtgtagtggtttataagtggtagttattatattgtttttttgttgagtattagtttttttatttgtaaagggatagttgaatatatattttttaggattgttgtaagaatttgttagataaatgattaaagtataaattttggaatttaataggtataggttggtattttgttttgttttttattagttgtaagattttggattttttttgagttttagtttttttatttgtagtgaagggattatggtgttttttttattatatggttgttgtgagtatgaagagagatagtaggagtgagtttttggtgtggtgtttggttttgttttgatttgtaggtgtagtgatgaatgttattttttatggattttttttaatagtatagttgagttgtatttttttgtttttgtttagtgtttatggttagttttgggtgttggtataattagttttaatttggtggtgagtagtgtggttgtttatagtttttgatatgattgttattttttatttagttttttaaattatagttatttttattgttgagtgtgtggtaagtgtttgttgggtatagggtggagtgttattagaggtttgtttagagtttataatttatgatttgatatagtgagtaaaagtttttttttttattttaggattgtatattaaaaagaaaaaaaagtttgggggaaaaagaaagttgttttttgggttagttgggaaattatttttttttagattttgtagtttgtaggggaatggtgttttgtttttttaagaggtttttattaggggggtggggatggttggtgttttttttttttattggtagttgtgtttgtttttttttgagtgatagataagtaatttaattgaagaaagagattttagtgtgatggtgagttggagtaatagaagttgggtttggtttgtgtggggtggggttttaagaaggtggggtgggtggaggttggaggagttgttgagtggagatttgggagtaggagttgggtttaggtttgtgttttggtgagtgaggggtgttttgggggttggggtgtggtaggtggtggagaggggtttggtttgaaagatgtagggaagagaggttgggttgagtgttgtggttagtgtttgttttggaggttgaggggttgagagggtgggtttgggttggattgtgttggtttgttaggtttttgaggggtggtggttttgttggggttttaggaagggaggagagattgggttttggatttagaaggggtgttgtgtggtggaagagggtgggttaggtagttaggtatgggggttgggttgggtagtggttggagggagaaggagggaggtgttgggtgggaagattggggaggggtggtaaggagagggttgggaagaagttggagagtgtttggggtgggtttgtatgagttgaaagtttggggttatgtttaatttggatttggttgtttgtgtttattagtttgttttgtggattttgttggtttagtagtattttggtgtatgtattttttattttttgtgtttatttttgagtttaggttttttttgttttttgtttgggtagttgtagtgtgttaattggtttgttttgtgtaggtataggggttttttttttgttggttttgtattgtgtttagagaaattttttttttttttttgaaatttttttgagatggagttttgttttgttgtttaggttggagtgtaatggtgtgattttggtttatagtaatttttgttttttaggttttagttatttttttgttttagttttttaagtagttgggattatgggtgtttgttattatgtttagttaatttttgtatttttagtagagatggggttttattgtgttaggttggttttgaatttttgattttaagtgatttgtttgttttggttttttagagtgttgggattataggtgtgagttattgtgtttagttgagaaatgtagagtagatttggatgtttagggtatgaaattggtttggtgttttatttttttgtagggttagatttagaattttatttaggttttggagatttggttttgttgattttttttaagtttgtttatttgtttgtttgtttgtttagtgttttttatatattggtttttttttgttttttttatattttaagtttttgttttttttggggttttttatttagtattttttttttttggtttgtttttttttttttggtttagttttgtaaatttttttttattttttagatttttgtttaagtattatttttgtaggggaggtatttttgtttttgattttttgattagtattttatgtttattattttgggtatttgtttttaataatatttgtataattgtaattttatatttatttataaaagtattgatatttttttgtttattttattagattgtaaggtttatgaagaagatagtgttggttttgttttatgtagtatttttagtattttatatagggttaggtaatataaatatttattaaataaatagatgtagggt

SEQ ID NO: 266 - DNA, 50 bp, homo sapiens
ctccccttcagacgattttggtttggttgctcctgcttctggcggggtcg

SEQ ID NO: 267 - DNA, 50 bp, homo sapiens
tttttttttagacgattttggtttggttgtttttgtttttggcggggtcg

SEQ ID NO: 268 - DNA, 50 bp, homo sapiens
tttttttttagatgattttggtttggttgtttttgtttttggtggggttg

SEQ ID NO: 269 - DNA, 50 bp, homo sapiens
cgatttcgttagaagtaggagtaattaaattaaaatcgtttgaaggggag

SEQ ID NO: 270 - DNA, 50 bp, homo sapiens
tgattttgttagaagtaggagtaattaaattaaaattgtttgaaggggag

SEQ ID NO: 271 - DNA, 3001 bp, homo sapiens
tggtcatggtggcacatgcctgtaatcccagctgctcgggaggctgaggcaggagaatcacttgaaccagggaggcagaggttgtggtgagcagagatcgcgccattgctctccagcctgggcaacaagagcaaaagttcgtttaaaaaaaaaaaaaagtcctttcgatgtgactgtctcctcccaaatttgtagaccctcttaagatcatgcttttcagatacttcaaagattccagaagatatgccccgggggtcctggaagccacaaggtaaacacaacacatccccctccttgactatcaattttactagaggatgtggtgggaaaaccattatttgatattaaaacaaataggcttgggatggagtaggatgcaagctccccaggaaagtttaagataaaacctgagacttaaaagggtgttaagagtggcagcctagggaatttatcccggactccgggggagggggcagagtcaccagcctctgcatttagggattctccgaggaaaagtgtgagaacggctgcaggcaacccaggcgtcccggcgctaggagggacgcacccaggcctgcgcgaagagagggagaaagtgaagctgggagttgccactcccagacttgttggaatgcagttggagggggcgagctgggagcgcgcttgctcccaatcacaggagaaggaggaggtggaggaggagggctgcttgaggaagtataagaatgaagttgtgaagctgagattcccctccattgggaccggagaaaccaggggagccccccgggcagccgcgcgccccttcccacggggccctttactgcgccgcgcgcccggcccccacccctcgcagcaccccgcgccccgcgccctcccagccgggtccagccggagccatggggccggagccgcagtgagcaccatggagctggcggccttgtgccgctgggggctcctcctcgccctcttgccccccggagccgcgagcacccaaggtgggtctggtgtggggaggggacggagcagcggcgggaccctgccctgtggatgccccgccgaggtcccgcggccggcggggccagaggggcccggacgagctctcctatcccgaagttgtggacagtcgagacgctcagggcagccgggccctggggccctcgggcgggagggggcagttacacggcagcggctcgagatggcccatccaagagactggcgctttccaggctccgaggggctccgggaacttgtcaaagaagttctctgaaattgttcagaaagttttcccgcaaagggtgtattgcgtagagcgcgcgcgcgcgtttccccccttcttgagccccctcaagctttctcaaagcctttccagttggcagcctccgcctccggactggcctgggctggattccttgggggggtcctctgccctgcccctcctccagcccctccccgctccccttcagacgattttggtttggttgctcctgcttctggcggggtcgggtgtgtgtgtgtgtggtggagtggagggtggcatagcaacctgtcccaaccagagccggggaggaaagggtggcccggagggtggcctcttgctggggtctgggttgggggcgggggagacgtttgctttgaacagattcttggggccagcttagggactgtgctctgtgacttttggagcgcgtggaccatggaggggtgggggtgggtttcttggggtgtaaagtgggagagttcccagagaaggaagctaagaaataaggccagatgggagcctagggagggctgcgttgttctgctgccttttccttggtgctgtgcgtggggaagggtgagtgggggcagtgtgtatcctgacccatctgtccacctgtgtgcattaatcataaaagctaacatatagcctgggccaggtatactctgccaggaactgtttgtggtgttttgcatgcattctcctttaatcctagaacacccctatagtggaagttctgccagcattctggactgagtagcagtccagaggttgagtagcagctagtaagtggtggggtcaagatgggaccccaggcagtgcgacccccaaccatgcattcgaaatcgctatatggatgagtgcacctggagcaatgagggacactgctccctgagtcactgggctgcaggggagacaaaatgaaagtgttctgggagtcgtgggtggtctccataggtcagagggtctggggagggagtgggtgtcatcgtggctgtgtgttgcccgaggggccctctgtgagtgagtgcatggccgtgttatctctgcaggtctacgccagggtgttcctcagttgtgtggtctttgtatttgtgtgtctgggctttgtgttgccaaacagcagtctctctgctgacttggggacacaggctgaactctgtcctctgcaggaactcccttaaggtgctgggccagatctgccataaacagagggaggtagccttctatggccacgccttcttgctgaggaagaaggttcctctcttccagggagtacatccttgccctccctgtttcccagacaagcatcttcacctctcatcttctgatgagaagggtgaggccatactgagctgtcaggctgagctgctgcccttcctcaccttgggctgggagttgatcagggaatggcagttgctgcagagctggatttgagggctgggttctctggatggggcctcctcatgtcctcacccctcaacctgcactattgattgtgttgtgcaggagttagttaaaaagtcattgcacagcctgggcaacaaggcaaaactctgtacaaaaaatacaaaaattagttggatgtgattacacgtgcctgtagtcccagctactccggaggctgaggcaggaggatcacctgagcccaggaagttgaggcttgcagtgagctgtgattgcaaatgctctccagcctgggtgacagtgtgagactccgtttcagaaaaaaagtataccacc

SEQ ID NO: 272 - DNA, 3001 bp, homo sapiens
tggttatggtggtatatgtttgtaattttagttgttcgggaggttgaggtaggagaattatttgaattagggaggtagaggttgtggtgagtagagatcgcgttattgttttttagtttgggtaataagagtaaaagttcgtttaaaaaaaaaaaaaagttttttcgatgtgattgtttttttttaaatttgtagatttttttaagattatgttttttagatattttaaagattttagaagatatgtttcgggggttttggaagttataaggtaaatataatatatttttttttttgattattaattttattagaggatgtggtgggaaaattattatttgatattaaaataaataggtttgggatggagtaggatgtaagttttttaggaaagtttaagataaaatttgagatttaaaagggtgttaagagtggtagtttagggaatttatttcggatttcgggggagggggtagagttattagtttttgtatttagggatttttcgaggaaaagtgtgagaacggttgtaggtaatttaggcgtttcggcgttaggagggacgtatttaggtttgcgcgaagagagggagaaagtgaagttgggagttgttatttttagatttgttggaatgtagttggagggggcgagttgggagcgcgtttgtttttaattataggagaaggaggaggtggaggaggagggttgtttgaggaagtataagaatgaagttgtgaagttgagatttttttttattgggatcggagaaattaggggagtttttcgggtagtcgcgcgtttttttttacggggttttttattgcgtcgcgcgttcggtttttatttttcgtagtatttcgcgtttcgcgtttttttagtcgggtttagtcggagttatggggtcggagtcgtagtgagtattatggagttggcggttttgtgtcgttgggggttttttttcgtttttttgtttttcggagtcgcgagtatttaaggtgggtttggtgtggggaggggacggagtagcggcgggattttgttttgtggatgtttcgtcgaggtttcgcggtcggcggggttagaggggttcggacgagtttttttatttcgaagttgtggatagtcgagacgtttagggtagtcgggttttggggttttcgggcgggagggggtagttatacggtagcggttcgagatggtttatttaagagattggcgttttttaggtttcgaggggtttcgggaatttgttaaagaagttttttgaaattgtttagaaagttttttcgtaaagggtgtattgcgtagagcgcgcgcgcgcgttttttttttttttgagtttttttaagtttttttaaagtttttttagttggtagttttcgttttcggattggtttgggttggattttttgggggggttttttgttttgttttttttttagttttttttcgtttttttttagacgattttggtttggttgtttttgtttttggcggggtcgggtgtgtgtgtgtgtggtggagtggagggtggtatagtaatttgttttaattagagtcggggaggaaagggtggttcggagggtggttttttgttggggtttgggttgggggcgggggagacgtttgttttgaatagatttttggggttagtttagggattgtgttttgtgatttttggagcgcgtggattatggaggggtgggggtgggttttttggggtgtaaagtgggagagtttttagagaaggaagttaagaaataaggttagatgggagtttagggagggttgcgttgttttgttgttttttttttggtgttgtgcgtggggaagggtgagtgggggtagtgtgtattttgatttatttgtttatttgtgtgtattaattataaaagttaatatatagtttgggttaggtatattttgttaggaattgtttgtggtgttttgtatgtatttttttttaattttagaatatttttatagtggaagttttgttagtattttggattgagtagtagtttagaggttgagtagtagttagtaagtggtggggttaagatgggattttaggtagtgcgatttttaattatgtattcgaaatcgttatatggatgagtgtatttggagtaatgagggatattgttttttgagttattgggttgtaggggagataaaatgaaagtgttttgggagtcgtgggtggtttttataggttagagggtttggggagggagtgggtgttatcgtggttgtgtgttgttcgaggggttttttgtgagtgagtgtatggtcgtgttatttttgtaggtttacgttagggtgttttttagttgtgtggtttttgtatttgtgtgtttgggttttgtgttgttaaatagtagtttttttgttgatttggggatataggttgaattttgttttttgtaggaatttttttaaggtgttgggttagatttgttataaatagagggaggtagttttttatggttacgtttttttgttgaggaagaaggttttttttttttagggagtatatttttgttttttttgttttttagataagtatttttattttttattttttgatgagaagggtgaggttatattgagttgttaggttgagttgttgtttttttttattttgggttgggagttgattagggaatggtagttgttgtagagttggatttgagggttgggttttttggatggggtttttttatgtttttattttttaatttgtattattgattgtgttgtgtaggagttagttaaaaagttattgtatagtttgggtaataaggtaaaattttgtataaaaaatataaaaattagttggatgtgattatacgtgtttgtagttttagttatttcggaggttgaggtaggaggattatttgagtttaggaagttgaggtttgtagtgagttgtgattgtaaatgttttttagtttgggtgatagtgtgagatttcgttttagaaaaaaagtatattatt

SEQ ID NO: 273 - DNA, 3001 bp, homo sapiens
tggttatggtggtatatgtttgtaattttagttgtttgggaggttgaggtaggagaattatttgaattagggaggtagaggttgtggtgagtagagattgtgttattgttttttagtttgggtaataagagtaaaagtttgtttaaaaaaaaaaaaaagtttttttgatgtgattgtttttttttaaatttgtagatttttttaagattatgttttttagatattttaaagattttagaagatatgttttgggggttttggaagttataaggtaaatataatatatttttttttttgattattaattttattagaggatgtggtgggaaaattattatttgatattaaaataaataggtttgggatggagtaggatgtaagttttttaggaaagtttaagataaaatttgagatttaaaagggtgttaagagtggtagtttagggaatttattttggattttgggggagggggtagagttattagtttttgtatttagggattttttgaggaaaagtgtgagaatggttgtaggtaatttaggtgttttggtgttaggagggatgtatttaggtttgtgtgaagagagggagaaagtgaagttgggagttgttatttttagatttgttggaatgtagttggagggggtgagttgggagtgtgtttgtttttaattataggagaaggaggaggtggaggaggagggttgtttgaggaagtataagaatgaagttgtgaagttgagatttttttttattgggattggagaaattaggggagttttttgggtagttgtgtgtttttttttatggggttttttattgtgttgtgtgtttggtttttattttttgtagtattttgtgttttgtgtttttttagttgggtttagttggagttatggggttggagttgtagtgagtattatggagttggtggttttgtgttgttgggggtttttttttgtttttttgttttttggagttgtgagtatttaaggtgggtttggtgtggggaggggatggagtagtggtgggattttgttttgtggatgttttgttgaggttttgtggttggtggggttagaggggtttggatgagtttttttattttgaagttgtggatagttgagatgtttagggtagttgggttttggggtttttgggtgggagggggtagttatatggtagtggtttgagatggtttatttaagagattggtgttttttaggttttgaggggttttgggaatttgttaaagaagttttttgaaattgtttagaaagtttttttgtaaagggtgtattgtgtagagtgtgtgtgtgtgttttttttttttttgagtttttttaagtttttttaaagtttttttagttggtagtttttgtttttggattggtttgggttggattttttgggggggttttttgttttgttttttttttagtttttttttgtttttttttagatgattttggtttggttgtttttgtttttggtggggttgggtgtgtgtgtgtgtggtggagtggagggtggtatagtaatttgttttaattagagttggggaggaaagggtggtttggagggtggttttttgttggggtttgggttgggggtgggggagatgtttgttttgaatagatttttggggttagtttagggattgtgttttgtgatttttggagtgtgtggattatggaggggtgggggtgggttttttggggtgtaaagtgggagagtttttagagaaggaagttaagaaataaggttagatgggagtttagggagggttgtgttgttttgttgttttttttttggtgttgtgtgtggggaagggtgagtgggggtagtgtgtattttgatttatttgtttatttgtgtgtattaattataaaagttaatatatagtttgggttaggtatattttgttaggaattgtttgtggtgttttgtatgtatttttttttaattttagaatatttttatagtggaagttttgttagtattttggattgagtagtagtttagaggttgagtagtagttagtaagtggtggggttaagatgggattttaggtagtgtgatttttaattatgtatttgaaattgttatatggatgagtgtatttggagtaatgagggatattgttttttgagttattgggttgtaggggagataaaatgaaagtgttttgggagttgtgggtggtttttataggttagagggtttggggagggagtgggtgttattgtggttgtgtgttgtttgaggggttttttgtgagtgagtgtatggttgtgttatttttgtaggtttatgttagggtgttttttagttgtgtggtttttgtatttgtgtgtttgggttttgtgttgttaaatagtagtttttttgttgatttggggatataggttgaattttgttttttgtaggaatttttttaaggtgttgggttagatttgttataaatagagggaggtagttttttatggttatgtttttttgttgaggaagaaggttttttttttttagggagtatatttttgttttttttgttttttagataagtatttttattttttattttttgatgagaagggtgaggttatattgagttgttaggttgagttgttgtttttttttattttgggttgggagttgattagggaatggtagttgttgtagagttggatttgagggttgggttttttggatggggtttttttatgtttttattttttaatttgtattattgattgtgttgtgtaggagttagttaaaaagttattgtatagtttgggtaataaggtaaaattttgtataaaaaatataaaaattagttggatgtgattatatgtgtttgtagttttagttattttggaggttgaggtaggaggattatttgagtttaggaagttgaggtttgtagtgagttgtgattgtaaatgttttttagtttgggtgatagtgtgagattttgttttagaaaaaaagtatattatt

SEQ ID NO: 274 - DNA, 3001 bp, homo sapiens
ggtggtatattttttttttgaaacggagttttatattgttatttaggttggagagtatttgtaattatagtttattgtaagttttaattttttgggtttaggtgatttttttgttttagttttcggagtagttgggattataggtacgtgtaattatatttaattaatttttgtattttttgtatagagttttgttttgttgtttaggttgtgtaatgattttttaattaatttttgtataatataattaatagtgtaggttgaggggtgaggatatgaggaggttttatttagagaatttagtttttaaatttagttttgtagtaattgttattttttgattaatttttagtttaaggtgaggaagggtagtagtttagtttgatagtttagtatggttttattttttttattagaagatgagaggtgaagatgtttgtttgggaaatagggagggtaaggatgtattttttggaagagaggaatttttttttttagtaagaaggcgtggttatagaaggttatttttttttgtttatggtagatttggtttagtattttaagggagtttttgtagaggatagagtttagtttgtgtttttaagttagtagagagattgttgtttggtaatataaagtttagatatataaatataaagattatataattgaggaatattttggcgtagatttgtagagataatacggttatgtatttatttatagagggtttttcgggtaatatatagttacgatgatatttattttttttttagattttttgatttatggagattatttacgatttttagaatatttttattttgttttttttgtagtttagtgatttagggagtagtgttttttattgttttaggtgtatttatttatatagcgatttcgaatgtatggttgggggtcgtattgtttggggttttattttgattttattatttattagttgttatttaatttttggattgttatttagtttagaatgttggtagaatttttattataggggtgttttaggattaaaggagaatgtatgtaaaatattataaatagtttttggtagagtatatttggtttaggttatatgttagtttttatgattaatgtatataggtggatagatgggttaggatatatattgtttttatttatttttttttacgtatagtattaaggaaaaggtagtagaataacgtagttttttttaggtttttatttggttttattttttagtttttttttttgggaatttttttattttatattttaagaaatttatttttatttttttatggtttacgcgttttaaaagttatagagtatagtttttaagttggttttaagaatttgtttaaagtaaacgtttttttcgtttttaatttagattttagtaagaggttatttttcgggttattttttttttttcggttttggttgggataggttgttatgttattttttattttattatatatatatatattcgatttcgttagaagtaggagtaattaaattaaaatcgtttgaaggggagcggggaggggttggaggaggggtagggtagaggatttttttaaggaatttagtttaggttagttcggaggcggaggttgttaattggaaaggttttgagaaagtttgagggggtttaagaaggggggaaacgcgcgcgcgcgttttacgtaatatattttttgcgggaaaattttttgaataattttagagaatttttttgataagttttcggagtttttcggagtttggaaagcgttagttttttggatgggttatttcgagtcgttgtcgtgtaattgttttttttcgttcgagggttttagggttcggttgttttgagcgtttcgattgtttataatttcgggataggagagttcgttcgggtttttttggtttcgtcggtcgcgggatttcggcggggtatttatagggtagggtttcgtcgttgtttcgttttttttttatattagatttattttgggtgttcgcggtttcggggggtaagagggcgaggaggagtttttagcggtataaggtcgttagttttatggtgtttattgcggtttcggttttatggtttcggttggattcggttgggagggcgcggggcgcggggtgttgcgaggggtgggggtcgggcgcgcggcgtagtaaagggtttcgtgggaaggggcgcgcggttgttcggggggtttttttggttttttcggttttaatggaggggaattttagttttataattttatttttatatttttttaagtagttttttttttttatttttttttttttttgtgattgggagtaagcgcgtttttagttcgttttttttaattgtattttaataagtttgggagtggtaatttttagttttatttttttttttttttcgcgtaggtttgggtgcgttttttttagcgtcgggacgtttgggttgtttgtagtcgtttttatattttttttcggagaatttttaaatgtagaggttggtgattttgttttttttttcggagttcgggataaattttttaggttgttatttttaatatttttttaagttttaggttttattttaaatttttttggggagtttgtattttattttattttaagtttatttgttttaatattaaataatggtttttttattatattttttagtaaaattgatagttaaggagggggatgtgttgtgtttattttgtggtttttaggattttcggggtatattttttggaatttttgaagtatttgaaaagtatgattttaagagggtttataaatttgggaggagatagttatatcgaaaggatttttttttttttttaaacgaatttttgtttttgttgtttaggttggagagtaatggcgcgatttttgtttattataatttttgtttttttggtttaagtgatttttttgttttagtttttcgagtagttgggattataggtatgtgttattatgatta

SEQ ID NO: 275 - DNA, 3001 bp, homo sapiens
ggtggtatattttttttttgaaatggagttttatattgttatttaggttggagagtatttgtaattatagtttattgtaagttttaattttttgggtttaggtgatttttttgttttagtttttggagtagttgggattataggtatgtgtaattatatttaattaatttttgtattttttgtatagagttttgttttgttgtttaggttgtgtaatgattttttaattaatttttgtataatataattaatagtgtaggttgaggggtgaggatatgaggaggttttatttagagaatttagtttttaaatttagttttgtagtaattgttattttttgattaatttttagtttaaggtgaggaagggtagtagtttagtttgatagtttagtatggttttattttttttattagaagatgagaggtgaagatgtttgtttgggaaatagggagggtaaggatgtattttttggaagagaggaatttttttttttagtaagaaggtgtggttatagaaggttatttttttttgtttatggtagatttggtttagtattttaagggagtttttgtagaggatagagtttagtttgtgtttttaagttagtagagagattgttgtttggtaatataaagtttagatatataaatataaagattatataattgaggaatattttggtgtagatttgtagagataatatggttatgtatttatttatagagggttttttgggtaatatatagttatgatgatatttattttttttttagattttttgatttatggagattatttatgatttttagaatatttttattttgttttttttgtagtttagtgatttagggagtagtgttttttattgttttaggtgtatttatttatatagtgattttgaatgtatggttgggggttgtattgtttggggttttattttgattttattatttattagttgttatttaatttttggattgttatttagtttagaatgttggtagaatttttattataggggtgttttaggattaaaggagaatgtatgtaaaatattataaatagtttttggtagagtatatttggtttaggttatatgttagtttttatgattaatgtatataggtggatagatgggttaggatatatattgtttttatttatttttttttatgtatagtattaaggaaaaggtagtagaataatgtagttttttttaggtttttatttggttttattttttagtttttttttttgggaatttttttattttatattttaagaaatttatttttatttttttatggtttatgtgttttaaaagttatagagtatagtttttaagttggttttaagaatttgtttaaagtaaatgttttttttgtttttaatttagattttagtaagaggttattttttgggttatttttttttttttggttttggttgggataggttgttatgttattttttattttattatatatatatatatttgattttgttagaagtaggagtaattaaattaaaattgtttgaaggggagtggggaggggttggaggaggggtagggtagaggatttttttaaggaatttagtttaggttagtttggaggtggaggttgttaattggaaaggttttgagaaagtttgagggggtttaagaaggggggaaatgtgtgtgtgtgttttatgtaatatattttttgtgggaaaattttttgaataattttagagaatttttttgataagtttttggagttttttggagtttggaaagtgttagttttttggatgggttattttgagttgttgttgtgtaattgtttttttttgtttgagggttttagggtttggttgttttgagtgttttgattgtttataattttgggataggagagtttgtttgggtttttttggttttgttggttgtgggattttggtggggtatttatagggtagggttttgttgttgttttgttttttttttatattagatttattttgggtgtttgtggttttggggggtaagagggtgaggaggagtttttagtggtataaggttgttagttttatggtgtttattgtggttttggttttatggttttggttggatttggttgggagggtgtggggtgtggggtgttgtgaggggtgggggttgggtgtgtggtgtagtaaagggttttgtgggaaggggtgtgtggttgtttggggggtttttttggtttttttggttttaatggaggggaattttagttttataattttatttttatatttttttaagtagttttttttttttatttttttttttttttgtgattgggagtaagtgtgtttttagtttgttttttttaattgtattttaataagtttgggagtggtaatttttagttttattttttttttttttttgtgtaggtttgggtgtgttttttttagtgttgggatgtttgggttgtttgtagttgtttttatatttttttttggagaatttttaaatgtagaggttggtgattttgtttttttttttggagtttgggataaattttttaggttgttatttttaatatttttttaagttttaggttttattttaaatttttttggggagtttgtattttattttattttaagtttatttgttttaatattaaataatggtttttttattatattttttagtaaaattgatagttaaggagggggatgtgttgtgtttattttgtggtttttaggatttttggggtatattttttggaatttttgaagtatttgaaaagtatgattttaagagggtttataaatttgggaggagatagttatattgaaaggatttttttttttttttaaatgaatttttgtttttgttgtttaggttggagagtaatggtgtgatttttgtttattataatttttgtttttttggtttaagtgatttttttgttttagttttttgagtagttgggattataggtatgtgttattatgatta

SEQ ID NO: 276 - DNA, 2233 bp, homo sapiens
taggggagaataaataaaatctgtggcatcagacaggtattaccgaggcgaagagtggactgggctttcgtgggcacttaccctgggaagggggtatgaggtggctggagaagtgttcatggagagtgtctctctcctgcccccaaggccacggaatcttctattccttctttgtacccaaagggcaaagtggaggccagggtctctttgctaaggagctaagtaggggaaagaggcagggggagctcccagcaggaccaaagggagaccaaggtttggaccccagaacagagcaggaacccagagtcctgtgcagtcacaggatgacgcagggaggacggctgttggtgatcttttctagggtttctccattactggctcttcggatggcctcaatgagctagaggagtggaatgacaggatgatgcactgttggggtagggtgaccaagaggtcctcccaacgctgtaaatactcacatctttctcatagggaaagcccccattctccagcttggagaacaccagctgtccatttatctctatctcaaaggcacctggtaagaaatcaacagataaatggtacactgagaacataggcagaagtcaggagttcctccaaaggggtcccccgccttcaagtcccccatcaatcccactggagacccatttgtagctccttaagcaattccccaaccctgggtcaactccagggaacctgagggaggcctcgcctgtgtgcccctcgcaacactcaataaaggactccctcccctccaaccctacacgattgcagtctaataggtttttccccacaggcctctgtgacaccccctgacctatggaagggaactcatgttggccggacattttaccatgtgccaggcactgcgggcactttacataaagcagccaatgtcagaactagaaagcgggagagctgggattcagagcacagactgacccagcaggtgttctgcgagcctcacctgtgcccccgaggcgcgactcgatctcgatgcccggatactgctccttcacagcactggccagctccaggtaggtcgcctcgaagccgcagggttcactggggagtcaagagatggggctgggctggggattcgggggtggggcctcccgtggacccacctccgtccggcccgcgggaccagggtgcgggtcctccagccggggccgctcaccagtactccaccacgatgcggaccccactgcccggctcgacctcctcgggagggggcgctacggacgtctgccccggctccccgctcatcgcggccggctccgctcgggcccctgcttccgggtgtgacgcgaaccgcgggcacgtgacggggcggggcctctggagcggggaggggccgagggtggcgttcgggcgccccctgcgggtctccgccactgctacgttttgacctcgtagggcagctccggagctcgctccccgggcaggggctgggtccggtccagaccctccttccctggcccggtctcccggagtgccgggcttccccactccccactcccggtgtccgctggacttcatggcttcatttactctaatggactatcttagactgcaaagcgcttttcagtttacaaaagaaagagaaagtggtggggcaagcatcctggggatgggggtgggtgtggctgatgcatgaaatagttgacattttctcgctaacatgccgatggcattttttttttttttttttttgagacggagtttcgctcttgttgcccaggctggagtgcaatggcgcgatctcggttcactgcaacctctgcctcccgggttcaagcgattcttctgcctcagcttcccgagtagctgggactacaggcgcgtgccaccgcacccggttaattttgtattcttagtagagacagggtttcatcatgttggtcaggctggtctcgaactcttgacctcaggtgatccaccagcctcggcctcctaaagtgctggaattacagacatgagccaccgcgcctggcccagttttttgtttgtttgtttgtttgttttagtagagacagggtttcaccatgttcgccagactggtctcgaactcctgacctcaaatgatctgcctgccttggcctcccaaagtgctgggattacaggcgtgagccaccacgcccggtgctgatggcatttggaaccaccctgtagttacatacacaagtgtttctgatcccaaagctctaaa

SEQ ID NO: 277 - DNA, 2233 bp, homo sapiens
taggggagaataaataaaatttgtggtattagataggtattatcgaggcgaagagtggattgggttttcgtgggtatttattttgggaagggggtatgaggtggttggagaagtgtttatggagagtgttttttttttgtttttaaggttacggaattttttattttttttttgtatttaaagggtaaagtggaggttagggtttttttgttaaggagttaagtaggggaaagaggtagggggagtttttagtaggattaaagggagattaaggtttggattttagaatagagtaggaatttagagttttgtgtagttataggatgacgtagggaggacggttgttggtgattttttttagggtttttttattattggtttttcggatggttttaatgagttagaggagtggaatgataggatgatgtattgttggggtagggtgattaagaggtttttttaacgttgtaaatatttatattttttttatagggaaagtttttattttttagtttggagaatattagttgtttatttatttttattttaaaggtatttggtaagaaattaatagataaatggtatattgagaatataggtagaagttaggagtttttttaaaggggtttttcgtttttaagttttttattaattttattggagatttatttgtagttttttaagtaattttttaattttgggttaattttagggaatttgagggaggtttcgtttgtgtgtttttcgtaatatttaataaaggatttttttttttttaattttatacgattgtagtttaataggtttttttttataggtttttgtgatattttttgatttatggaagggaatttatgttggtcggatattttattatgtgttaggtattgcgggtattttatataaagtagttaatgttagaattagaaagcgggagagttgggatttagagtatagattgatttagtaggtgttttgcgagttttatttgtgttttcgaggcgcgattcgatttcgatgttcggatattgtttttttatagtattggttagttttaggtaggtcgtttcgaagtcgtagggtttattggggagttaagagatggggttgggttggggattcgggggtggggtttttcgtggatttattttcgttcggttcgcgggattagggtgcgggttttttagtcggggtcgtttattagtattttattacgatgcggattttattgttcggttcgattttttcgggagggggcgttacggacgtttgtttcggtttttcgtttatcgcggtcggtttcgttcgggtttttgttttcgggtgtgacgcgaatcgcgggtacgtgacggggcggggtttttggagcggggaggggtcgagggtggcgttcgggcgttttttgcgggttttcgttattgttacgttttgatttcgtagggtagtttcggagttcgtttttcgggtaggggttgggttcggtttagattttttttttttggttcggtttttcggagtgtcgggtttttttattttttattttcggtgttcgttggattttatggttttatttattttaatggattattttagattgtaaagcgttttttagtttataaaagaaagagaaagtggtggggtaagtattttggggatgggggtgggtgtggttgatgtatgaaatagttgatattttttcgttaatatgtcgatggtattttttttttttttttttttgagacggagtttcgtttttgttgtttaggttggagtgtaatggcgcgatttcggtttattgtaatttttgtttttcgggtttaagcgatttttttgttttagtttttcgagtagttgggattataggcgcgtgttatcgtattcggttaattttgtatttttagtagagatagggttttattatgttggttaggttggtttcgaatttttgattttaggtgatttattagtttcggttttttaaagtgttggaattatagatatgagttatcgcgtttggtttagttttttgtttgtttgtttgtttgttttagtagagatagggttttattatgttcgttagattggtttcgaatttttgattttaaatgatttgtttgttttggttttttaaagtgttgggattataggcgtgagttattacgttcggtgttgatggtatttggaattattttgtagttatatatataagtgtttttgattttaaagttttaaa

SEQ ID NO: 278 - DNA, 2233 bp, homo sapiens
taggggagaataaataaaatttgtggtattagataggtattattgaggtgaagagtggattgggtttttgtgggtatttattttgggaagggggtatgaggtggttggagaagtgtttatggagagtgttttttttttgtttttaaggttatggaattttttattttttttttgtatttaaagggtaaagtggaggttagggtttttttgttaaggagttaagtaggggaaagaggtagggggagtttttagtaggattaaagggagattaaggtttggattttagaatagagtaggaatttagagttttgtgtagttataggatgatgtagggaggatggttgttggtgattttttttagggtttttttattattggttttttggatggttttaatgagttagaggagtggaatgataggatgatgtattgttggggtagggtgattaagaggtttttttaatgttgtaaatatttatattttttttatagggaaagtttttattttttagtttggagaatattagttgtttatttatttttattttaaaggtatttggtaagaaattaatagataaatggtatattgagaatataggtagaagttaggagtttttttaaaggggttttttgtttttaagttttttattaattttattggagatttatttgtagttttttaagtaattttttaattttgggttaattttagggaatttgagggaggttttgtttgtgtgttttttgtaatatttaataaaggatttttttttttttaattttatatgattgtagtttaataggtttttttttataggtttttgtgatattttttgatttatggaagggaatttatgttggttggatattttattatgtgttaggtattgtgggtattttatataaagtagttaatgttagaattagaaagtgggagagttgggatttagagtatagattgatttagtaggtgttttgtgagttttatttgtgtttttgaggtgtgatttgattttgatgtttggatattgtttttttatagtattggttagttttaggtaggttgttttgaagttgtagggtttattggggagttaagagatggggttgggttggggatttgggggtggggttttttgtggatttatttttgtttggtttgtgggattagggtgtgggttttttagttggggttgtttattagtattttattatgatgtggattttattgtttggtttgatttttttgggagggggtgttatggatgtttgttttggttttttgtttattgtggttggttttgtttgggtttttgtttttgggtgtgatgtgaattgtgggtatgtgatggggtggggtttttggagtggggaggggttgagggtggtgtttgggtgttttttgtgggtttttgttattgttatgttttgattttgtagggtagttttggagtttgttttttgggtaggggttgggtttggtttagattttttttttttggtttggttttttggagtgttgggtttttttattttttatttttggtgtttgttggattttatggttttatttattttaatggattattttagattgtaaagtgttttttagtttataaaagaaagagaaagtggtggggtaagtattttggggatgggggtgggtgtggttgatgtatgaaatagttgatatttttttgttaatatgttgatggtattttttttttttttttttttgagatggagttttgtttttgttgtttaggttggagtgtaatggtgtgattttggtttattgtaatttttgttttttgggtttaagtgatttttttgttttagttttttgagtagttgggattataggtgtgtgttattgtatttggttaattttgtatttttagtagagatagggttttattatgttggttaggttggttttgaatttttgattttaggtgatttattagttttggttttttaaagtgttggaattatagatatgagttattgtgtttggtttagttttttgtttgtttgtttgtttgttttagtagagatagggttttattatgtttgttagattggttttgaatttttgattttaaatgatttgtttgttttggttttttaaagtgttgggattataggtgtgagttattatgtttggtgttgatggtatttggaattattttgtagttatatatataagtgtttttgattttaaagttttaaa

SEQ ID NO: 279 - DNA, 2233 bp, homo sapiens
tttagagttttgggattagaaatatttgtgtatgtaattatagggtggttttaaatgttattagtatcgggcgtggtggtttacgtttgtaattttagtattttgggaggttaaggtaggtagattatttgaggttaggagttcgagattagtttggcgaatatggtgaaattttgtttttattaaaataaataaataaataaataaaaaattgggttaggcgcggtggtttatgtttgtaattttagtattttaggaggtcgaggttggtggattatttgaggttaagagttcgagattagtttgattaatatgatgaaattttgtttttattaagaatataaaattaatcgggtgcggtggtacgcgtttgtagttttagttattcgggaagttgaggtagaagaatcgtttgaattcgggaggtagaggttgtagtgaatcgagatcgcgttattgtattttagtttgggtaataagagcgaaatttcgttttaaaaaaaaaaaaaaaaaaaatgttatcggtatgttagcgagaaaatgttaattattttatgtattagttatatttatttttatttttaggatgtttgttttattatttttttttttttttgtaaattgaaaagcgttttgtagtttaagatagtttattagagtaaatgaagttatgaagtttagcggatatcgggagtggggagtggggaagttcggtatttcgggagatcgggttagggaaggagggtttggatcggatttagtttttgttcggggagcgagtttcggagttgttttacgaggttaaaacgtagtagtggcggagattcgtagggggcgttcgaacgttattttcggttttttttcgttttagaggtttcgtttcgttacgtgttcgcggttcgcgttatattcggaagtaggggttcgagcggagtcggtcgcgatgagcggggagtcggggtagacgttcgtagcgttttttttcgaggaggtcgagtcgggtagtggggttcgtatcgtggtggagtattggtgagcggtttcggttggaggattcgtattttggtttcgcgggtcggacggaggtgggtttacgggaggttttattttcgaatttttagtttagttttattttttgattttttagtgaattttgcggtttcgaggcgatttatttggagttggttagtgttgtgaaggagtagtattcgggtatcgagatcgagtcgcgtttcgggggtataggtgaggttcgtagaatatttgttgggttagtttgtgttttgaattttagttttttcgttttttagttttgatattggttgttttatgtaaagtgttcgtagtgtttggtatatggtaaaatgttcggttaatatgagtttttttttataggttagggggtgttatagaggtttgtggggaaaaatttattagattgtaatcgtgtagggttggaggggagggagttttttattgagtgttgcgaggggtatataggcgaggttttttttaggttttttggagttgatttagggttggggaattgtttaaggagttataaatgggtttttagtgggattgatgggggatttgaaggcgggggatttttttggaggaatttttgatttttgtttatgtttttagtgtattatttatttgttgattttttattaggtgtttttgagatagagataaatggatagttggtgttttttaagttggagaatgggggttttttttatgagaaagatgtgagtatttatagcgttgggaggattttttggttattttattttaatagtgtattattttgttattttatttttttagtttattgaggttattcgaagagttagtaatggagaaattttagaaaagattattaatagtcgttttttttgcgttattttgtgattgtataggattttgggtttttgttttgttttggggtttaaattttggtttttttttggttttgttgggagttttttttgttttttttttttatttagttttttagtaaagagattttggtttttattttgttttttgggtataaagaaggaatagaagatttcgtggttttgggggtaggagagagatattttttatgaatatttttttagttattttatattttttttttagggtaagtgtttacgaaagtttagtttatttttcgtttcggtaatatttgtttgatgttatagattttatttattttttttta

SEQ ID NO: 280 - DNA, 2233 bp, homo sapiens
tttagagttttgggattagaaatatttgtgtatgtaattatagggtggttttaaatgttattagtattgggtgtggtggtttatgtttgtaattttagtattttgggaggttaaggtaggtagattatttgaggttaggagtttgagattagtttggtgaatatggtgaaattttgtttttattaaaataaataaataaataaataaaaaattgggttaggtgtggtggtttatgtttgtaattttagtattttaggaggttgaggttggtggattatttgaggttaagagtttgagattagtttgattaatatgatgaaattttgtttttattaagaatataaaattaattgggtgtggtggtatgtgtttgtagttttagttatttgggaagttgaggtagaagaattgtttgaatttgggaggtagaggttgtagtgaattgagattgtgttattgtattttagtttgggtaataagagtgaaattttgttttaaaaaaaaaaaaaaaaaaaatgttattggtatgttagtgagaaaatgttaattattttatgtattagttatatttatttttatttttaggatgtttgttttattatttttttttttttttgtaaattgaaaagtgttttgtagtttaagatagtttattagagtaaatgaagttatgaagtttagtggatattgggagtggggagtggggaagtttggtattttgggagattgggttagggaaggagggtttggattggatttagtttttgtttggggagtgagttttggagttgttttatgaggttaaaatgtagtagtggtggagatttgtagggggtgtttgaatgttatttttggtttttttttgttttagaggttttgttttgttatgtgtttgtggtttgtgttatatttggaagtaggggtttgagtggagttggttgtgatgagtggggagttggggtagatgtttgtagtgtttttttttgaggaggttgagttgggtagtggggtttgtattgtggtggagtattggtgagtggttttggttggaggatttgtattttggttttgtgggttggatggaggtgggtttatgggaggttttatttttgaatttttagtttagttttattttttgattttttagtgaattttgtggttttgaggtgatttatttggagttggttagtgttgtgaaggagtagtatttgggtattgagattgagttgtgttttgggggtataggtgaggtttgtagaatatttgttgggttagtttgtgttttgaattttagtttttttgttttttagttttgatattggttgttttatgtaaagtgtttgtagtgtttggtatatggtaaaatgtttggttaatatgagtttttttttataggttagggggtgttatagaggtttgtggggaaaaatttattagattgtaattgtgtagggttggaggggagggagttttttattgagtgttgtgaggggtatataggtgaggttttttttaggttttttggagttgatttagggttggggaattgtttaaggagttataaatgggtttttagtgggattgatgggggatttgaaggtgggggatttttttggaggaatttttgatttttgtttatgtttttagtgtattatttatttgttgattttttattaggtgtttttgagatagagataaatggatagttggtgttttttaagttggagaatgggggttttttttatgagaaagatgtgagtatttatagtgttgggaggattttttggttattttattttaatagtgtattattttgttattttatttttttagtttattgaggttatttgaagagttagtaatggagaaattttagaaaagattattaatagttgttttttttgtgttattttgtgattgtataggattttgggtttttgttttgttttggggtttaaattttggtttttttttggttttgttgggagttttttttgttttttttttttatttagttttttagtaaagagattttggtttttattttgttttttgggtataaagaaggaatagaagattttgtggttttgggggtaggagagagatattttttatgaatatttttttagttattttatattttttttttagggtaagtgtttatgaaagtttagtttattttttgttttggtaatatttgtttgatgttatagattttatttattttttttta

SEQ ID NO: 281 - DNA, 628 bp, homo sapiens
cctcttggcatggcttctctagctgggtcctacctgccttggcatccttccctccccctctgtttctgaaatctcagaactcttcctctccctacatcggccccacctgtccccacccctccagcccacagccatgcccacagccagttccctggttcacttggacctggggcctcccctaaaagtcccctgcggtcccttcctcctcactgcagtgggcgagggcctggcctgccaccagctgtgcgcccgagggcactgctggggtccagggcccacccagtgtgtcaactgcagccagttccttcggggccaggagtgcgtggaggaatgccgagtactgcaggggtatgaggggcggaggagagggtggctggaggggtgcatggggctcctctcagaccccctcaccactgtcccttctctcaggctccccagggagtatgtgaatgccaggcactgtttgccgtgccaccctgagtgtcagccccagaatggctcagtgacctgttttggaccggtgagctgctggcgggctcagagctgggtggaggggggcagcgagggggattgccagggacttggcaggatggcgagatgcagtagggtgtgctatctggtaaaatat

SEQ ID NO: 282 - DNA, 628 bp, homo sapiens
ttttttggtatggtttttttagttgggttttatttgttttggtatttttttttttttttttgtttttgaaattttagaattttttttttttttatatcggttttatttgtttttatttttttagtttatagttatgtttatagttagttttttggtttatttggatttggggttttttttaaaagttttttgcggtttttttttttttattgtagtgggcgagggtttggtttgttattagttgtgcgttcgagggtattgttggggtttagggtttatttagtgtgttaattgtagttagttttttcggggttaggagtgcgtggaggaatgtcgagtattgtaggggtatgaggggcggaggagagggtggttggaggggtgtatggggttttttttagatttttttattattgtttttttttttaggttttttagggagtatgtgaatgttaggtattgtttgtcgtgttattttgagtgttagttttagaatggtttagtgatttgttttggatcggtgagttgttggcgggtttagagttgggtggaggggggtagcgagggggattgttagggatttggtaggatggcgagatgtagtagggtgtgttatttggtaaaatat

SEQ ID NO: 283 - DNA, 628 bp, homo sapiens
ttttttggtatggtttttttagttgggttttatttgttttggtatttttttttttttttttgtttttgaaattttagaattttttttttttttatattggttttatttgtttttatttttttagtttatagttatgtttatagttagttttttggtttatttggatttggggttttttttaaaagttttttgtggtttttttttttttattgtagtgggtgagggtttggtttgttattagttgtgtgtttgagggtattgttggggtttagggtttatttagtgtgttaattgtagttagtttttttggggttaggagtgtgtggaggaatgttgagtattgtaggggtatgaggggtggaggagagggtggttggaggggtgtatggggttttttttagatttttttattattgtttttttttttaggttttttagggagtatgtgaatgttaggtattgtttgttgtgttattttgagtgttagttttagaatggtttagtgatttgttttggattggtgagttgttggtgggtttagagttgggtggaggggggtagtgagggggattgttagggatttggtaggatggtgagatgtagtagggtgtgttatttggtaaaatat

SEQ ID NO: 284 - DNA, 628 bp, homo sapiens
atattttattagatagtatattttattgtatttcgttattttgttaagtttttggtaatttttttcgttgtttttttttatttagttttgagttcgttagtagtttatcggtttaaaataggttattgagttattttggggttgatatttagggtggtacggtaaatagtgtttggtatttatatattttttggggagtttgagagaagggatagtggtgagggggtttgagaggagttttatgtatttttttagttattttttttttcgttttttatatttttgtagtattcggtatttttttacgtatttttggtttcgaaggaattggttgtagttgatatattgggtgggttttggattttagtagtgttttcgggcgtatagttggtggtaggttaggttttcgtttattgtagtgaggaggaagggatcgtaggggatttttaggggaggttttaggtttaagtgaattagggaattggttgtgggtatggttgtgggttggaggggtggggataggtggggtcgatgtagggagaggaagagttttgagattttagaaatagagggggagggaaggatgttaaggtaggtaggatttagttagagaagttatgttaagagg

SEQ ID NO: 285 - DNA, 628 bp, homo sapiens
atattttattagatagtatattttattgtattttgttattttgttaagtttttggtaattttttttgttgtttttttttatttagttttgagtttgttagtagtttattggtttaaaataggttattgagttattttggggttgatatttagggtggtatggtaaatagtgtttggtatttatatattttttggggagtttgagagaagggatagtggtgagggggtttgagaggagttttatgtatttttttagttatttttttttttgttttttatatttttgtagtatttggtatttttttatgtatttttggttttgaaggaattggttgtagttgatatattgggtgggttttggattttagtagtgtttttgggtgtatagttggtggtaggttaggtttttgtttattgtagtgaggaggaagggattgtaggggatttttaggggaggttttaggtttaagtgaattagggaattggttgtgggtatggttgtgggttggaggggtggggataggtggggttgatgtagggagaggaagagttttgagattttagaaatagagggggagggaaggatgttaaggtaggtaggatttagttagagaagttatgttaagagg

SEQ ID NO: 286 - DNA, 1186 bp, homo sapiens
tctgggcagctcaggcacctgtgggcctgagggtgccctctgcccccacccttccgatctcctgggcaagacacgccaggtgattcatctcaccagagcagaaaaacaagttcaactgggcactttaatctcccctcactggcaggcctggtgtgagctgctaccccggcgcccctcaccaggggtgctttacctcctctagtattcctgaccttagtgggcatttctggtctcagggataccaggctggggtccaagtgggccaggtgtggcagttcagccctatgccccatggctgatggctcgcgctgggcaggtatgcagggctgacgtagtgcctttgtggcagcagtttcgtggcacacattctgccagctggttctggagtcttgccctgaggaggtggccagggtgagggtgccagcgcaggaacctttggcgcatgcttcaccctggcctgggatctgcagcctgggtccagatgcccacaactggaatctgacgctccttttctcttcatgggggactcccagaggtctctgcaatgaccagagccccggttgtcccatgcctcagctgcaactccagctgaccctccttccccactctctgggtggcattacgggggtgtggatcccttgccaagaggttggcatgtgggtgtgctggaatggcatagggagaatgcaccgagtttgtttgcttgggagaggggcagggggtatccagaagattcatgattcgtcatcgcctctcttgggggatttttacccctttgccctgagttgtgcctttgggacaaaggaagcctttctttgccagccaacaccctgtactggcgggcgagctccccagggctggcacgctggggcagcctctgaatgcacagggtgggcctagtcagaagaagcctttcccctgaaatccctctacttcccaagcacgcaagctttctcctgctgttaaacctgcagtgtgcaagggacatgggcggaggggtccttcagtcaggcttctccctgtctgaggtggcatgacttggagtgagtttggatggggtggccaggtctgagaaggtcccccgccagtgtcctctgacccatctgctctctcctgccagtgtgcaccggcacagacatgaagctgcggctccctgccagtcccgagacccacctggacatgctcc

SEQ ID NO: 287 - DNA, 1186 bp, homo sapiens
tttgggtagtttaggtatttgtgggtttgagggtgttttttgtttttattttttcgattttttgggtaagatacgttaggtgatttattttattagagtagaaaaataagtttaattgggtattttaatttttttttattggtaggtttggtgtgagttgttatttcggcgttttttattaggggtgttttattttttttagtatttttgattttagtgggtatttttggttttagggatattaggttggggtttaagtgggttaggtgtggtagtttagttttatgttttatggttgatggttcgcgttgggtaggtatgtagggttgacgtagtgtttttgtggtagtagtttcgtggtatatattttgttagttggttttggagttttgttttgaggaggtggttagggtgagggtgttagcgtaggaatttttggcgtatgttttattttggtttgggatttgtagtttgggtttagatgtttataattggaatttgacgttttttttttttttatgggggatttttagaggtttttgtaatgattagagtttcggttgttttatgttttagttgtaattttagttgattttttttttttattttttgggtggtattacgggggtgtggattttttgttaagaggttggtatgtgggtgtgttggaatggtatagggagaatgtatcgagtttgtttgtttgggagaggggtagggggtatttagaagatttatgattcgttatcgttttttttgggggatttttatttttttgttttgagttgtgtttttgggataaaggaagtttttttttgttagttaatattttgtattggcgggcgagttttttagggttggtacgttggggtagtttttgaatgtatagggtgggtttagttagaagaagttttttttttgaaatttttttattttttaagtacgtaagtttttttttgttgttaaatttgtagtgtgtaagggatatgggcggaggggttttttagttaggtttttttttgtttgaggtggtatgatttggagtgagtttggatggggtggttaggtttgagaaggtttttcgttagtgttttttgatttatttgtttttttttgttagtgtgtatcggtatagatatgaagttgcggttttttgttagtttcgagatttatttggatatgtttt

SEQ ID NO: 288 - DNA, 1186 bp, homo sapiens
tttgggtagtttaggtatttgtgggtttgagggtgttttttgtttttatttttttgattttttgggtaagatatgttaggtgatttattttattagagtagaaaaataagtttaattgggtattttaatttttttttattggtaggtttggtgtgagttgttattttggtgttttttattaggggtgttttattttttttagtatttttgattttagtgggtatttttggttttagggatattaggttggggtttaagtgggttaggtgtggtagtttagttttatgttttatggttgatggtttgtgttgggtaggtatgtagggttgatgtagtgtttttgtggtagtagttttgtggtatatattttgttagttggttttggagttttgttttgaggaggtggttagggtgagggtgttagtgtaggaatttttggtgtatgttttattttggtttgggatttgtagtttgggtttagatgtttataattggaatttgatgttttttttttttttatgggggatttttagaggtttttgtaatgattagagttttggttgttttatgttttagttgtaattttagttgattttttttttttattttttgggtggtattatgggggtgtggattttttgttaagaggttggtatgtgggtgtgttggaatggtatagggagaatgtattgagtttgtttgtttgggagaggggtagggggtatttagaagatttatgatttgttattgttttttttgggggatttttatttttttgttttgagttgtgtttttgggataaaggaagtttttttttgttagttaatattttgtattggtgggtgagttttttagggttggtatgttggggtagtttttgaatgtatagggtgggtttagttagaagaagttttttttttgaaatttttttattttttaagtatgtaagtttttttttgttgttaaatttgtagtgtgtaagggatatgggtggaggggttttttagttaggtttttttttgtttgaggtggtatgatttggagtgagtttggatggggtggttaggtttgagaaggttttttgttagtgttttttgatttatttgtttttttttgttagtgtgtattggtatagatatgaagttgtggttttttgttagttttgagatttatttggatatgtttt

SEQ ID NO: 289 - DNA, 1186 bp, homo sapiens
ggagtatgtttaggtgggtttcgggattggtagggagtcgtagttttatgtttgtgtcggtgtatattggtaggagagagtagatgggttagaggatattggcgggggatttttttagatttggttattttatttaaatttattttaagttatgttattttagatagggagaagtttgattgaaggattttttcgtttatgttttttgtatattgtaggtttaatagtaggagaaagtttgcgtgtttgggaagtagagggattttaggggaaaggttttttttgattaggtttattttgtgtatttagaggttgttttagcgtgttagttttggggagttcgttcgttagtatagggtgttggttggtaaagaaaggttttttttgttttaaaggtataatttagggtaaaggggtaaaaattttttaagagaggcgatgacgaattatgaattttttggatattttttgttttttttttaagtaaataaattcggtgtattttttttatgttattttagtatatttatatgttaattttttggtaagggatttatattttcgtaatgttatttagagagtggggaaggagggttagttggagttgtagttgaggtatgggataatcggggttttggttattgtagagatttttgggagttttttatgaagagaaaaggagcgttagattttagttgtgggtatttggatttaggttgtagattttaggttagggtgaagtatgcgttaaaggtttttgcgttggtatttttattttggttatttttttagggtaagattttagaattagttggtagaatgtgtgttacgaaattgttgttataaaggtattacgttagttttgtatatttgtttagcgcgagttattagttatggggtatagggttgaattgttatatttggtttatttggattttagtttggtatttttgagattagaaatgtttattaaggttaggaatattagaggaggtaaagtatttttggtgaggggcgtcggggtagtagtttatattaggtttgttagtgaggggagattaaagtgtttagttgaatttgtttttttgttttggtgagatgaattatttggcgtgttttgtttaggagatcggaagggtgggggtagagggtatttttaggtttataggtgtttgagttgtttaga

SEQ ID NO: 290 - DNA, 1186 bp, homo sapiens
ggagtatgtttaggtgggttttgggattggtagggagttgtagttttatgtttgtgttggtgtatattggtaggagagagtagatgggttagaggatattggtgggggatttttttagatttggttattttatttaaatttattttaagttatgttattttagatagggagaagtttgattgaaggatttttttgtttatgttttttgtatattgtaggtttaatagtaggagaaagtttgtgtgtttgggaagtagagggattttaggggaaaggttttttttgattaggtttattttgtgtatttagaggttgttttagtgtgttagttttggggagtttgtttgttagtatagggtgttggttggtaaagaaaggttttttttgttttaaaggtataatttagggtaaaggggtaaaaattttttaagagaggtgatgatgaattatgaattttttggatattttttgttttttttttaagtaaataaatttggtgtattttttttatgttattttagtatatttatatgttaattttttggtaagggatttatatttttgtaatgttatttagagagtggggaaggagggttagttggagttgtagttgaggtatgggataattggggttttggttattgtagagatttttgggagttttttatgaagagaaaaggagtgttagattttagttgtgggtatttggatttaggttgtagattttaggttagggtgaagtatgtgttaaaggtttttgtgttggtatttttattttggttatttttttagggtaagattttagaattagttggtagaatgtgtgttatgaaattgttgttataaaggtattatgttagttttgtatatttgtttagtgtgagttattagttatggggtatagggttgaattgttatatttggtttatttggattttagtttggtatttttgagattagaaatgtttattaaggttaggaatattagaggaggtaaagtatttttggtgaggggtgttggggtagtagtttatattaggtttgttagtgaggggagattaaagtgtttagttgaatttgtttttttgttttggtgagatgaattatttggtgtgttttgtttaggagattggaagggtgggggtagagggtatttttaggtttataggtgtttgagttgtttaga

SEQ ID NO: 291 - DNA, 50 bp, homo sapiens
cgcttgcagataccatcaaagcgtcactctggcagcggcttccaagtctg

SEQ ID NO: 292 - DNA, 50 bp, homo sapiens
cgtttgtagatattattaaagcgttattttggtagcggtttttaagtttg

SEQ ID NO: 293 - DNA, 50 bp, homo sapiens
tgtttgtagatattattaaagtgttattttggtagtggtttttaagtttg

SEQ ID NO: 294 - DNA, 50 bp, homo sapiens
tagatttggaagtcgttgttagagtgacgttttgatggtatttgtaagcg

SEQ ID NO: 295 - DNA, 50 bp, homo sapiens
tagatttggaagttgttgttagagtgatgttttgatggtatttgtaagtg

SEQ ID NO: 296 - DNA, 3001 bp, homo sapiens
atagaactttatttcaaaatgaaagtatagaagaatgcaagtaatgtaaatagtggacctctaacatggctttggtcctagttagaaagcttggagagcggggaaggtgcttaggtaggtagacgaatagtcagctaggctgcatggatggttgctcctctaatactcttagctcaggaaagttcaagtaaatttaaatgccgggcacttcagggcatacacattctcagggttttcaggagtccagtctccagccttacctttttttttctattcagtgcagcaaggttttaaaacattaatgtgtacttcacgattatggcatcacattcacctggttcagcatattttccaacactgcagcaaggccaactcttttccagacgtatattcccctatgcaatcatttaactacgttctccaccctatgcccaatagtccccttcccatatcaaggagggagtagaggtaaacagatcaggatctgtatatttcattagtgccccgtggcttcattggccttctctctgactctgtggatgccctgagtatatttagagacgttctatcaggttagacaagcctctatccctttggccctcaccaggactgctgtccctggtgctgaaccatgtttgcacacgggtagttggctgttgggtcaatgggactggatgcaaaacctggctgactgaccttaagaatgccaggtgcagaagcatgcgatgccttagtacacaggaacagggccgcccgccgcccctccccccagctccctcacacatatctctccggtgtgcgccaggacccatttgtaaatttctccatcagacccccacccaaaatgcttgcaacacggcctcaaatgccggcgtgtatcagcacagcccactccgatatcagattgcaataatgtcaaaatgctactccctaaatatttagtctttatgaggttaccttttccactctaaaaccaaacaaaaaataaaataaaatccaataaatgaatacattaacgaaagtgaccttccactttcctccctccagtccccgccccatatattcgctctctcctaaattgtaaagccgcacatcctaggagagtgttttaaatctgggtggtctcccgagttacccctccccacaccttccccccacctcttcagaacaaaacgacgccaaaaagggcacatcttacccagggtagagcgacagcaggagcagaatccacaccgtcattttctgtgaaaatacaggagtcgagtagactgagcttcctgtgctccatatatttggcgaactcatcgcttttttttttttccttctctcgcctcttgcctcttggttgcagaagaatccctcccctttgtattattcttatgcttatgatctgatggtggctccccccacctgcctctagtaggtccttcactggggagatggattgctaccagattagggaattaatattcagggggcagagataagatcagcaaaaacgcttgcagataccatcaaagcgtcactctggcagcggcttccaagtctgggggagtaatatcatcgaggcagggggagggtacaaggagagactcatacggagacaaataagggagagggaaagacacgcacactcgtgtatactcatgcccctcacacttacgcgttctcccctgggtccatctctttggggttatttatttgtttgttttgattttttttcttttacagggggcagagccctgtgggtgtgtgtatttaaaataaataggaaaaaaatcactagagactctgcgtgattaactatcacgcagattaactatgaggtcaaagtggaagtgatgcacgctgctgcagcacgaattaacacatgcgtggtgtctttccaaagctttttaaccctttactgcacacaccagcatgcaaggactggcattcatggggacaagagatgctttagcaagcccagaagctacatcatcaatgacagaaggtttgtggtcgtcagatctgccaagaatccttattttaaactcgtacagtcttagaaatcatggttgcattgttagagctgggggagcagacagtgggggaggtgtgagtgtctcagtaagtcatcctgtaggcagacagatttggtgaattcaatttgaatgagagaagaaaacattgatagaattaaaggacatggagaaattctatgctactcaagattcattcctcccttgtcagttctccaaccccagtgaaaatgcacagacacaaaactgcttgaagtttgacaaatgtaattgcgtggggatagctgcttgaataaagattacacatcacaaaataggagggctgttttttgaaggaagggtgggcagaggggtataatcaggaggtcatttaacaatgcaaagggatttctgtttgtcatgtggggggttgattttttgttcttggtaataatcccgaaagtttttagtttggatgagtggtattagtatgcttctttcttgcctagaatgttactatagatactaatatgtagaagataccccctttatgccaaaccagttcatccaccacagaggaaatccctttcattaatcatgaaaaataaagtgggggagtgtttcatggttctttaaagtcaagataccacattgaaagtatgcaggaagcagtagtagtgatgaggaacaatcttagctctttgtggaaagtgacaaggagttgtttcaaaataagtgccttttttgcaagaaaaaagtcttccaggaatggaacttgggtaaggagtctaggagacataggaatagaacatgagaaaatcaggtccacactccatcactaacactaaagtatatccaaggaaagcagaaagaattaccagtggctgctgcccatcacatgggctgaggagatgcatcctgacaatgaagcaaaaaagtcctgacagacccacctggaatcctgcatggcttcataattctgccttaggcagagttattct

SEQ ID NO: 297 - DNA, 3001 bp, homo sapiens
atagaattttattttaaaatgaaagtatagaagaatgtaagtaatgtaaatagtggatttttaatatggttttggttttagttagaaagtttggagagcggggaaggtgtttaggtaggtagacgaatagttagttaggttgtatggatggttgtttttttaatatttttagtttaggaaagtttaagtaaatttaaatgtcgggtattttagggtatatatatttttagggtttttaggagtttagtttttagttttatttttttttttttatttagtgtagtaaggttttaaaatattaatgtgtattttacgattatggtattatatttatttggtttagtatattttttaatattgtagtaaggttaatttttttttagacgtatatttttttatgtaattatttaattacgttttttattttatgtttaatagttttttttttatattaaggagggagtagaggtaaatagattaggatttgtatattttattagtgtttcgtggttttattggttttttttttgattttgtggatgttttgagtatatttagagacgttttattaggttagataagtttttatttttttggtttttattaggattgttgtttttggtgttgaattatgtttgtatacgggtagttggttgttgggttaatgggattggatgtaaaatttggttgattgattttaagaatgttaggtgtagaagtatgcgatgttttagtatataggaatagggtcgttcgtcgtttttttttttagtttttttatatatattttttcggtgtgcgttaggatttatttgtaaatttttttattagatttttatttaaaatgtttgtaatacggttttaaatgtcggcgtgtattagtatagtttatttcgatattagattgtaataatgttaaaatgttattttttaaatatttagtttttatgaggttattttttttattttaaaattaaataaaaaataaaataaaatttaataaatgaatatattaacgaaagtgattttttatttttttttttttagttttcgttttatatattcgtttttttttaaattgtaaagtcgtatattttaggagagtgttttaaatttgggtggtttttcgagttatttttttttatattttttttttatttttttagaataaaacgacgttaaaaagggtatattttatttagggtagagcgatagtaggagtagaatttatatcgttattttttgtgaaaatataggagtcgagtagattgagttttttgtgttttatatatttggcgaatttatcgtttttttttttttttttttttcgttttttgttttttggttgtagaagaattttttttttttgtattatttttatgtttatgatttgatggtggttttttttatttgtttttagtaggttttttattggggagatggattgttattagattagggaattaatatttagggggtagagataagattagtaaaaacgtttgtagatattattaaagcgttattttggtagcggtttttaagtttgggggagtaatattatcgaggtagggggagggtataaggagagatttatacggagataaataagggagagggaaagatacgtatattcgtgtatatttatgttttttatatttacgcgtttttttttgggtttatttttttggggttatttatttgtttgttttgatttttttttttttatagggggtagagttttgtgggtgtgtgtatttaaaataaataggaaaaaaattattagagattttgcgtgattaattattacgtagattaattatgaggttaaagtggaagtgatgtacgttgttgtagtacgaattaatatatgcgtggtgtttttttaaagttttttaattttttattgtatatattagtatgtaaggattggtatttatggggataagagatgttttagtaagtttagaagttatattattaatgatagaaggtttgtggtcgttagatttgttaagaatttttattttaaattcgtatagttttagaaattatggttgtattgttagagttgggggagtagatagtgggggaggtgtgagtgttttagtaagttattttgtaggtagatagatttggtgaatttaatttgaatgagagaagaaaatattgatagaattaaaggatatggagaaattttatgttatttaagatttattttttttttgttagttttttaattttagtgaaaatgtatagatataaaattgtttgaagtttgataaatgtaattgcgtggggatagttgtttgaataaagattatatattataaaataggagggttgttttttgaaggaagggtgggtagaggggtataattaggaggttatttaataatgtaaagggatttttgtttgttatgtggggggttgattttttgtttttggtaataatttcgaaagtttttagtttggatgagtggtattagtatgttttttttttgtttagaatgttattatagatattaatatgtagaagatattttttttatgttaaattagtttatttattatagaggaaattttttttattaattatgaaaaataaagtgggggagtgttttatggttttttaaagttaagatattatattgaaagtatgtaggaagtagtagtagtgatgaggaataattttagttttttgtggaaagtgataaggagttgttttaaaataagtgttttttttgtaagaaaaaagttttttaggaatggaatttgggtaaggagtttaggagatataggaatagaatatgagaaaattaggtttatattttattattaatattaaagtatatttaaggaaagtagaaagaattattagtggttgttgtttattatatgggttgaggagatgtattttgataatgaagtaaaaaagttttgatagatttatttggaattttgtatggttttataattttgttttaggtagagttatttt

SEQ ID NO: 298 - DNA, 3001 bp, homo sapiens
atagaattttattttaaaatgaaagtatagaagaatgtaagtaatgtaaatagtggatttttaatatggttttggttttagttagaaagtttggagagtggggaaggtgtttaggtaggtagatgaatagttagttaggttgtatggatggttgtttttttaatatttttagtttaggaaagtttaagtaaatttaaatgttgggtattttagggtatatatatttttagggtttttaggagtttagtttttagttttatttttttttttttatttagtgtagtaaggttttaaaatattaatgtgtattttatgattatggtattatatttatttggtttagtatattttttaatattgtagtaaggttaatttttttttagatgtatatttttttatgtaattatttaattatgttttttattttatgtttaatagttttttttttatattaaggagggagtagaggtaaatagattaggatttgtatattttattagtgttttgtggttttattggttttttttttgattttgtggatgttttgagtatatttagagatgttttattaggttagataagtttttatttttttggtttttattaggattgttgtttttggtgttgaattatgtttgtatatgggtagttggttgttgggttaatgggattggatgtaaaatttggttgattgattttaagaatgttaggtgtagaagtatgtgatgttttagtatataggaatagggttgtttgttgtttttttttttagtttttttatatatatttttttggtgtgtgttaggatttatttgtaaatttttttattagatttttatttaaaatgtttgtaatatggttttaaatgttggtgtgtattagtatagtttattttgatattagattgtaataatgttaaaatgttattttttaaatatttagtttttatgaggttattttttttattttaaaattaaataaaaaataaaataaaatttaataaatgaatatattaatgaaagtgattttttatttttttttttttagtttttgttttatatatttgtttttttttaaattgtaaagttgtatattttaggagagtgttttaaatttgggtggttttttgagttatttttttttatattttttttttatttttttagaataaaatgatgttaaaaagggtatattttatttagggtagagtgatagtaggagtagaatttatattgttattttttgtgaaaatataggagttgagtagattgagttttttgtgttttatatatttggtgaatttattgttttttttttttttttttttttgttttttgttttttggttgtagaagaattttttttttttgtattatttttatgtttatgatttgatggtggttttttttatttgtttttagtaggttttttattggggagatggattgttattagattagggaattaatatttagggggtagagataagattagtaaaaatgtttgtagatattattaaagtgttattttggtagtggtttttaagtttgggggagtaatattattgaggtagggggagggtataaggagagatttatatggagataaataagggagagggaaagatatgtatatttgtgtatatttatgttttttatatttatgtgtttttttttgggtttatttttttggggttatttatttgtttgttttgatttttttttttttatagggggtagagttttgtgggtgtgtgtatttaaaataaataggaaaaaaattattagagattttgtgtgattaattattatgtagattaattatgaggttaaagtggaagtgatgtatgttgttgtagtatgaattaatatatgtgtggtgtttttttaaagttttttaattttttattgtatatattagtatgtaaggattggtatttatggggataagagatgttttagtaagtttagaagttatattattaatgatagaaggtttgtggttgttagatttgttaagaatttttattttaaatttgtatagttttagaaattatggttgtattgttagagttgggggagtagatagtgggggaggtgtgagtgttttagtaagttattttgtaggtagatagatttggtgaatttaatttgaatgagagaagaaaatattgatagaattaaaggatatggagaaattttatgttatttaagatttattttttttttgttagttttttaattttagtgaaaatgtatagatataaaattgtttgaagtttgataaatgtaattgtgtggggatagttgtttgaataaagattatatattataaaataggagggttgttttttgaaggaagggtgggtagaggggtataattaggaggttatttaataatgtaaagggatttttgtttgttatgtggggggttgattttttgtttttggtaataattttgaaagtttttagtttggatgagtggtattagtatgttttttttttgtttagaatgttattatagatattaatatgtagaagatattttttttatgttaaattagtttatttattatagaggaaattttttttattaattatgaaaaataaagtgggggagtgttttatggttttttaaagttaagatattatattgaaagtatgtaggaagtagtagtagtgatgaggaataattttagttttttgtggaaagtgataaggagttgttttaaaataagtgttttttttgtaagaaaaaagttttttaggaatggaatttgggtaaggagtttaggagatataggaatagaatatgagaaaattaggtttatattttattattaatattaaagtatatttaaggaaagtagaaagaattattagtggttgttgtttattatatgggttgaggagatgtattttgataatgaagtaaaaaagttttgatagatttatttggaattttgtatggttttataattttgttttaggtagagttatttt

SEQ ID NO: 299 - DNA, 3001 bp, homo sapiens
agaataattttgtttaaggtagaattatgaagttatgtaggattttaggtgggtttgttaggatttttttgttttattgttaggatgtatttttttagtttatgtgatgggtagtagttattggtaattttttttgttttttttggatatattttagtgttagtgatggagtgtggatttgatttttttatgttttatttttatgttttttagattttttatttaagttttatttttggaagattttttttttgtaaaaaaggtatttattttgaaataattttttgttattttttataaagagttaagattgttttttattattattattgttttttgtatatttttaatgtggtattttgattttaaagaattatgaaatatttttttattttattttttatgattaatgaaagggattttttttgtggtggatgaattggtttggtataaagggggtattttttatatattagtatttatagtaatattttaggtaagaaagaagtatattaatattatttatttaaattaaaaattttcgggattattattaagaataaaaaattaattttttatatgataaatagaaatttttttgtattgttaaatgattttttgattatatttttttgtttattttttttttaaaaaatagtttttttattttgtgatgtgtaatttttatttaagtagttatttttacgtaattatatttgttaaattttaagtagttttgtgtttgtgtatttttattggggttggagaattgataagggaggaatgaattttgagtagtatagaatttttttatgttttttaattttattaatgttttttttttttatttaaattgaatttattaaatttgtttgtttataggatgatttattgagatatttatattttttttattgtttgtttttttagttttaataatgtaattatgatttttaagattgtacgagtttaaaataaggatttttggtagatttgacgattataaattttttgttattgatgatgtagtttttgggtttgttaaagtattttttgtttttatgaatgttagtttttgtatgttggtgtgtgtagtaaagggttaaaaagttttggaaagatattacgtatgtgttaattcgtgttgtagtagcgtgtattatttttattttgattttatagttaatttgcgtgatagttaattacgtagagtttttagtgattttttttttatttattttaaatatatatatttatagggttttgttttttgtaaaagaaaaaaaattaaaataaataaataaataattttaaagagatggatttaggggagaacgcgtaagtgtgaggggtatgagtatatacgagtgtgcgtgttttttttttttttttatttgttttcgtatgagtttttttttgtattttttttttgtttcgatgatattatttttttagatttggaagtcgttgttagagtgacgttttgatggtatttgtaagcgtttttgttgattttatttttgttttttgaatattaattttttaatttggtagtaatttatttttttagtgaaggatttattagaggtaggtggggggagttattattagattataagtataagaataatataaaggggagggatttttttgtaattaagaggtaagaggcgagagaaggaaaaaaaaaaaagcgatgagttcgttaaatatatggagtataggaagtttagtttattcgatttttgtatttttatagaaaatgacggtgtggattttgtttttgttgtcgttttattttgggtaagatgtgttttttttggcgtcgttttgttttgaagaggtggggggaaggtgtggggaggggtaattcgggagattatttagatttaaaatatttttttaggatgtgcggttttataatttaggagagagcgaatatatggggcggggattggagggaggaaagtggaaggttattttcgttaatgtatttatttattggattttattttattttttgtttggttttagagtggaaaaggtaattttataaagattaaatatttagggagtagtattttgatattattgtaatttgatatcggagtgggttgtgttgatatacgtcggtatttgaggtcgtgttgtaagtattttgggtgggggtttgatggagaaatttataaatgggttttggcgtatatcggagagatatgtgtgagggagttggggggaggggcggcgggcggttttgtttttgtgtattaaggtatcgtatgtttttgtatttggtatttttaaggttagttagttaggttttgtatttagttttattgatttaatagttaattattcgtgtgtaaatatggtttagtattagggatagtagttttggtgagggttaaagggatagaggtttgtttaatttgatagaacgtttttaaatatatttagggtatttatagagttagagagaaggttaatgaagttacggggtattaatgaaatatatagattttgatttgtttatttttattttttttttgatatgggaaggggattattgggtatagggtggagaacgtagttaaatgattgtataggggaatatacgtttggaaaagagttggttttgttgtagtgttggaaaatatgttgaattaggtgaatgtgatgttataatcgtgaagtatatattaatgttttaaaattttgttgtattgaatagaaaaaaaaaggtaaggttggagattggatttttgaaaattttgagaatgtgtatgttttgaagtgttcggtatttaaatttatttgaatttttttgagttaagagtattagaggagtaattatttatgtagtttagttgattattcgtttatttatttaagtatttttttcgttttttaagttttttaattaggattaaagttatgttagaggtttattatttatattatttgtatttttttatatttttattttgaaataaagttttat

SEQ ID NO: 300 - DNA, 3001 bp, homo sapiens
agaataattttgtttaaggtagaattatgaagttatgtaggattttaggtgggtttgttaggatttttttgttttattgttaggatgtatttttttagtttatgtgatgggtagtagttattggtaattttttttgttttttttggatatattttagtgttagtgatggagtgtggatttgatttttttatgttttatttttatgttttttagattttttatttaagttttatttttggaagattttttttttgtaaaaaaggtatttattttgaaataattttttgttattttttataaagagttaagattgttttttattattattattgttttttgtatatttttaatgtggtattttgattttaaagaattatgaaatatttttttattttattttttatgattaatgaaagggattttttttgtggtggatgaattggtttggtataaagggggtattttttatatattagtatttatagtaatattttaggtaagaaagaagtatattaatattatttatttaaattaaaaatttttgggattattattaagaataaaaaattaattttttatatgataaatagaaatttttttgtattgttaaatgattttttgattatatttttttgtttattttttttttaaaaaatagtttttttattttgtgatgtgtaatttttatttaagtagttatttttatgtaattatatttgttaaattttaagtagttttgtgtttgtgtatttttattggggttggagaattgataagggaggaatgaattttgagtagtatagaatttttttatgttttttaattttattaatgttttttttttttatttaaattgaatttattaaatttgtttgtttataggatgatttattgagatatttatattttttttattgtttgtttttttagttttaataatgtaattatgatttttaagattgtatgagtttaaaataaggatttttggtagatttgatgattataaattttttgttattgatgatgtagtttttgggtttgttaaagtattttttgtttttatgaatgttagtttttgtatgttggtgtgtgtagtaaagggttaaaaagttttggaaagatattatgtatgtgttaatttgtgttgtagtagtgtgtattatttttattttgattttatagttaatttgtgtgatagttaattatgtagagtttttagtgattttttttttatttattttaaatatatatatttatagggttttgttttttgtaaaagaaaaaaaattaaaataaataaataaataattttaaagagatggatttaggggagaatgtgtaagtgtgaggggtatgagtatatatgagtgtgtgtgttttttttttttttttatttgtttttgtatgagtttttttttgtattttttttttgttttgatgatattatttttttagatttggaagttgttgttagagtgatgttttgatggtatttgtaagtgtttttgttgattttatttttgttttttgaatattaattttttaatttggtagtaatttatttttttagtgaaggatttattagaggtaggtggggggagttattattagattataagtataagaataatataaaggggagggatttttttgtaattaagaggtaagaggtgagagaaggaaaaaaaaaaaagtgatgagtttgttaaatatatggagtataggaagtttagtttatttgatttttgtatttttatagaaaatgatggtgtggattttgtttttgttgttgttttattttgggtaagatgtgttttttttggtgttgttttgttttgaagaggtggggggaaggtgtggggaggggtaatttgggagattatttagatttaaaatatttttttaggatgtgtggttttataatttaggagagagtgaatatatggggtggggattggagggaggaaagtggaaggttatttttgttaatgtatttatttattggattttattttattttttgtttggttttagagtggaaaaggtaattttataaagattaaatatttagggagtagtattttgatattattgtaatttgatattggagtgggttgtgttgatatatgttggtatttgaggttgtgttgtaagtattttgggtgggggtttgatggagaaatttataaatgggttttggtgtatattggagagatatgtgtgagggagttggggggaggggtggtgggtggttttgtttttgtgtattaaggtattgtatgtttttgtatttggtatttttaaggttagttagttaggttttgtatttagttttattgatttaatagttaattatttgtgtgtaaatatggtttagtattagggatagtagttttggtgagggttaaagggatagaggtttgtttaatttgatagaatgtttttaaatatatttagggtatttatagagttagagagaaggttaatgaagttatggggtattaatgaaatatatagattttgatttgtttatttttattttttttttgatatgggaaggggattattgggtatagggtggagaatgtagttaaatgattgtataggggaatatatgtttggaaaagagttggttttgttgtagtgttggaaaatatgttgaattaggtgaatgtgatgttataattgtgaagtatatattaatgttttaaaattttgttgtattgaatagaaaaaaaaaggtaaggttggagattggatttttgaaaattttgagaatgtgtatgttttgaagtgtttggtatttaaatttatttgaatttttttgagttaagagtattagaggagtaattatttatgtagtttagttgattatttgtttatttatttaagtattttttttgttttttaagttttttaattaggattaaagttatgttagaggtttattatttatattatttgtatttttttatatttttattttgaaataaagttttat

SEQ ID NO: 301 - DNA, 50 bp, homo sapiens
cgctctggccaccactgctgcaactgctgccgctgccgccactgccgcca

SEQ ID NO: 302 - DNA, 50 bp, homo sapiens
cgttttggttattattgttgtaattgttgtcgttgtcgttattgtcgtta

SEQ ID NO: 303 - DNA, 50 bp, homo sapiens
tgttttggttattattgttgtaattgttgttgttgttgttattgttgtta

SEQ ID NO: 304 - DNA, 50 bp, homo sapiens
tggcggtagtggcggtagcggtagtagttgtagtagtggtggttagagcg

SEQ ID NO: 305 - DNA, 50 bp, homo sapiens
tggtggtagtggtggtagtggtagtagttgtagtagtggtggttagagtg

SEQ ID NO: 306 - DNA, 3001 bp, homo sapiens
aaactcgggactttagacttaagcgtcctccacaagttctttgttcaaccagtaacctcacagattcgtctgtgttggcttcatagtcacagctaaaggggtgcatggctctagtgagatcttacttagctctagacacctgctattgcgtttgacagctatgacctattcttccagacagaacctacactggaactcccaccagcagaaggaaattggtgcggtggaaacggggagcagggttcgaaagcacaggcaaaaggcgctcacaggaagcaagatccacgctggccacacaaactgtatctttccctttggaacgctggtacatctcatccatgtcaagtgactccccagtacgttcggtttgatcgcctgttgccctaacacttttcaggctaaaaactaccttggtgctgggagacacactgggtggttgggtttcctccaagcagggcttgatacgagggcacagaagggcagctaagggtcacgtctctgggtgcacagggtccaagtcctaattacagaggagaccggctgcccttgtctgtgccccattctccagcaaaggggtatatcgcaggtttgtgatttttagtaccaaacttggggcgatcaattcaattccctccaccttatgagaaagcagtaaaccgaaatccccggtggggcactggggaaattcctactcggaagagaaacggagttagactgcgtgtcccccacgccctgatgtctgctttcctggttccttccaactcatcctccaagacgaagggagccgggcgggaagcagatgcccagaacggggattcgtcgcaggcttggttaggggtccccagagctgcgctgcgctgcactcaggctacccgcaccaagcatccccggaagcctccccgggattcaccctgcgcggctgcagggcccgaaaggtcatcttcccacgagtgccaccaagggagcctgggggagcgaaggccgggctcggacgccgccagtccagagaccccctcattgccccttacctgcccgcggcgaatccggcagccccctgacagctcccagcagccgccactggaaaagtttccgaacttcttcgcaggtctgcacgccctcgctgcgggcggacccaaccagggccagaaggaggaggcagcgaaagcccacgggccaggtctgtgcgtccatcctcgccgtcctggtcccctttacccgccagtggaccccactcgccctgcgcgccctggctgagctgcagacgtggaagacacagcggccgaggctctcgagcggtgcgagccggctgcggggtgtacggaccgcccgcgggcaccggcttcacctgggagcagttagctcttcccggaggaggccctaagctgagacaccagagttttccagctgagcaccctctggtcttcttccctagccgagaagagtgggcggctgggcggggcgaagaaaactagtggagccgcagggagcccgcaagcatccgctctggccaccactgctgcaactgctgccgctgccgccactgccgccactgccgccactgccgccgccgccgccgcctccgccgcccggctcggctcgcagcagctaacctgggatgtgcccgctcgctgcgctccgcggaagccccgccccgcactccccgccccgcggacaggccacgcccctgccacgcccccggcgcgctgtcccgctccgcacccactaagatgctgtcatacgcggcccagtgctgaagactcggagcgacatcgatgcaaataaatagaaggaaacccggacctcgctctcccagtccgttctggggaagaatcatctgataaaaacagagaatgtataaatagggtcagagaagacaagagatgagaaacaccaactggaactaagaaatatctcatctatgtaatcaaggtcctcagtacataggaatttgtattctaattgcattaaataggatctggacataatacaaaaggcaaaaactatttacggttaaagatctcaattgagagacttcataacacttaggttgttaaagagtgcacatgagaagttattttttaaaatggctttgttttactgcttaggaacatttttctataacatgattttctgaaaggaggtataagaattacaatcaaactttatcacattcttatcacaatgaaatctagttttaagtctcttatcaccatttagcatcatattttacttcagcactttgtatttgtggggctcctctgagctttaccacttctggaatttctttaaaatatttttcagagagcaattaagttaagagtgctcaggggagttccttacaaggaatatagaaaaataaatactttaagcaattttaaaatggcaaaggaattttgtcaatttacagtttatgagaggaatgcattacgcaccataaaccaaagggcaggtgcattttttaaatgtggttgactcaacaactaagcctgtaagagtgtctcaatctacagccacttgaagagagtactccttctgtaaaataaactagttaaaagcatcaggcagaggggacaatgaatgctttaaccactttaaggaatttcatctcaaatttgaacccttaccaagagatagtagtgaaaaactttatgtcttagtgaagatttttaatgaacatttaatatcaaaggcagcactttcagcagtatatcacttgctttaaaaccattccagggcaatggctgaaacactgcttcagagtgaaatcatgctacttggtgtttggcatcagttttctgaatatgagattttgtttcaaagggcagtgctcttcatgaatctcttctgctctaaccaccaagtatggaaagattgtctggaagccacctatatctatgaaaagaaacaagaaaaaccatgagaatgtatatagtgcttatgggccagataatattctaagtattttatggaaatgaattcactcatgtaatctttataacaa

SEQ ID NO: 307 - DNA, 3001 bp, homo sapiens
aaattcgggattttagatttaagcgttttttataagttttttgtttaattagtaattttatagattcgtttgtgttggttttatagttatagttaaaggggtgtatggttttagtgagattttatttagttttagatatttgttattgcgtttgatagttatgatttatttttttagatagaatttatattggaatttttattagtagaaggaaattggtgcggtggaaacggggagtagggttcgaaagtataggtaaaaggcgtttataggaagtaagatttacgttggttatataaattgtatttttttttttggaacgttggtatattttatttatgttaagtgattttttagtacgttcggtttgatcgtttgttgttttaatattttttaggttaaaaattattttggtgttgggagatatattgggtggttgggttttttttaagtagggtttgatacgagggtatagaagggtagttaagggttacgtttttgggtgtatagggtttaagttttaattatagaggagatcggttgtttttgtttgtgttttattttttagtaaaggggtatatcgtaggtttgtgatttttagtattaaatttggggcgattaatttaattttttttattttatgagaaagtagtaaatcgaaattttcggtggggtattggggaaatttttattcggaagagaaacggagttagattgcgtgttttttacgttttgatgtttgtttttttggttttttttaatttattttttaagacgaagggagtcgggcgggaagtagatgtttagaacggggattcgtcgtaggtttggttaggggtttttagagttgcgttgcgttgtatttaggttattcgtattaagtattttcggaagttttttcgggatttattttgcgcggttgtagggttcgaaaggttatttttttacgagtgttattaagggagtttgggggagcgaaggtcgggttcggacgtcgttagtttagagatttttttattgttttttatttgttcgcggcgaattcggtagttttttgatagtttttagtagtcgttattggaaaagttttcgaattttttcgtaggtttgtacgttttcgttgcgggcggatttaattagggttagaaggaggaggtagcgaaagtttacgggttaggtttgtgcgtttattttcgtcgttttggttttttttattcgttagtggattttattcgttttgcgcgttttggttgagttgtagacgtggaagatatagcggtcgaggttttcgagcggtgcgagtcggttgcggggtgtacggatcgttcgcgggtatcggttttatttgggagtagttagtttttttcggaggaggttttaagttgagatattagagttttttagttgagtattttttggtttttttttttagtcgagaagagtgggcggttgggcggggcgaagaaaattagtggagtcgtagggagttcgtaagtattcgttttggttattattgttgtaattgttgtcgttgtcgttattgtcgttattgtcgttattgtcgtcgtcgtcgtcgttttcgtcgttcggttcggttcgtagtagttaatttgggatgtgttcgttcgttgcgtttcgcggaagtttcgtttcgtatttttcgtttcgcggataggttacgtttttgttacgttttcggcgcgttgtttcgtttcgtatttattaagatgttgttatacgcggtttagtgttgaagattcggagcgatatcgatgtaaataaatagaaggaaattcggatttcgtttttttagttcgttttggggaagaattatttgataaaaatagagaatgtataaatagggttagagaagataagagatgagaaatattaattggaattaagaaatattttatttatgtaattaaggtttttagtatataggaatttgtattttaattgtattaaataggatttggatataatataaaaggtaaaaattatttacggttaaagattttaattgagagattttataatatttaggttgttaaagagtgtatatgagaagttattttttaaaatggttttgttttattgtttaggaatatttttttataatatgattttttgaaaggaggtataagaattataattaaattttattatatttttattataatgaaatttagttttaagttttttattattatttagtattatattttattttagtattttgtatttgtggggtttttttgagttttattatttttggaatttttttaaaatattttttagagagtaattaagttaagagtgtttaggggagttttttataaggaatatagaaaaataaatattttaagtaattttaaaatggtaaaggaattttgttaatttatagtttatgagaggaatgtattacgtattataaattaaagggtaggtgtattttttaaatgtggttgatttaataattaagtttgtaagagtgttttaatttatagttatttgaagagagtattttttttgtaaaataaattagttaaaagtattaggtagaggggataatgaatgttttaattattttaaggaattttattttaaatttgaatttttattaagagatagtagtgaaaaattttatgttttagtgaagatttttaatgaatatttaatattaaaggtagtatttttagtagtatattatttgttttaaaattattttagggtaatggttgaaatattgttttagagtgaaattatgttatttggtgtttggtattagttttttgaatatgagattttgttttaaagggtagtgttttttatgaattttttttgttttaattattaagtatggaaagattgtttggaagttatttatatttatgaaaagaaataagaaaaattatgagaatgtatatagtgtttatgggttagataatattttaagtattttatggaaatgaatttatttatgtaatttttataataa

SEQ ID NO: 308 - DNA, 3001 bp, homo sapiens
aaatttgggattttagatttaagtgttttttataagttttttgtttaattagtaattttatagatttgtttgtgttggttttatagttatagttaaaggggtgtatggttttagtgagattttatttagttttagatatttgttattgtgtttgatagttatgatttatttttttagatagaatttatattggaatttttattagtagaaggaaattggtgtggtggaaatggggagtagggtttgaaagtataggtaaaaggtgtttataggaagtaagatttatgttggttatataaattgtatttttttttttggaatgttggtatattttatttatgttaagtgattttttagtatgtttggtttgattgtttgttgttttaatattttttaggttaaaaattattttggtgttgggagatatattgggtggttgggttttttttaagtagggtttgatatgagggtatagaagggtagttaagggttatgtttttgggtgtatagggtttaagttttaattatagaggagattggttgtttttgtttgtgttttattttttagtaaaggggtatattgtaggtttgtgatttttagtattaaatttggggtgattaatttaattttttttattttatgagaaagtagtaaattgaaatttttggtggggtattggggaaatttttatttggaagagaaatggagttagattgtgtgttttttatgttttgatgtttgtttttttggttttttttaatttattttttaagatgaagggagttgggtgggaagtagatgtttagaatggggatttgttgtaggtttggttaggggtttttagagttgtgttgtgttgtatttaggttatttgtattaagtatttttggaagtttttttgggatttattttgtgtggttgtagggtttgaaaggttatttttttatgagtgttattaagggagtttgggggagtgaaggttgggtttggatgttgttagtttagagatttttttattgttttttatttgtttgtggtgaatttggtagttttttgatagtttttagtagttgttattggaaaagtttttgaatttttttgtaggtttgtatgtttttgttgtgggtggatttaattagggttagaaggaggaggtagtgaaagtttatgggttaggtttgtgtgtttatttttgttgttttggttttttttatttgttagtggattttatttgttttgtgtgttttggttgagttgtagatgtggaagatatagtggttgaggtttttgagtggtgtgagttggttgtggggtgtatggattgtttgtgggtattggttttatttgggagtagttagttttttttggaggaggttttaagttgagatattagagttttttagttgagtattttttggtttttttttttagttgagaagagtgggtggttgggtggggtgaagaaaattagtggagttgtagggagtttgtaagtatttgttttggttattattgttgtaattgttgttgttgttgttattgttgttattgttgttattgttgttgttgttgttgtttttgttgtttggtttggtttgtagtagttaatttgggatgtgtttgtttgttgtgttttgtggaagttttgttttgtattttttgttttgtggataggttatgtttttgttatgtttttggtgtgttgttttgttttgtatttattaagatgttgttatatgtggtttagtgttgaagatttggagtgatattgatgtaaataaatagaaggaaatttggattttgtttttttagtttgttttggggaagaattatttgataaaaatagagaatgtataaatagggttagagaagataagagatgagaaatattaattggaattaagaaatattttatttatgtaattaaggtttttagtatataggaatttgtattttaattgtattaaataggatttggatataatataaaaggtaaaaattatttatggttaaagattttaattgagagattttataatatttaggttgttaaagagtgtatatgagaagttattttttaaaatggttttgttttattgtttaggaatatttttttataatatgattttttgaaaggaggtataagaattataattaaattttattatatttttattataatgaaatttagttttaagttttttattattatttagtattatattttattttagtattttgtatttgtggggtttttttgagttttattatttttggaatttttttaaaatattttttagagagtaattaagttaagagtgtttaggggagttttttataaggaatatagaaaaataaatattttaagtaattttaaaatggtaaaggaattttgttaatttatagtttatgagaggaatgtattatgtattataaattaaagggtaggtgtattttttaaatgtggttgatttaataattaagtttgtaagagtgttttaatttatagttatttgaagagagtattttttttgtaaaataaattagttaaaagtattaggtagaggggataatgaatgttttaattattttaaggaattttattttaaatttgaatttttattaagagatagtagtgaaaaattttatgttttagtgaagatttttaatgaatatttaatattaaaggtagtatttttagtagtatattatttgttttaaaattattttagggtaatggttgaaatattgttttagagtgaaattatgttatttggtgtttggtattagttttttgaatatgagattttgttttaaagggtagtgttttttatgaattttttttgttttaattattaagtatggaaagattgtttggaagttatttatatttatgaaaagaaataagaaaaattatgagaatgtatatagtgtttatgggttagataatattttaagtattttatggaaatgaatttatttatgtaatttttataataa

SEQ ID NO: 309 - DNA, 3001 bp, homo sapiens
ttgttataaagattatatgagtgaatttatttttataaaatatttagaatattatttggtttataagtattatatatatttttatggttttttttgtttttttttatagatataggtggtttttagataatttttttatatttggtggttagagtagaagagatttatgaagagtattgttttttgaaataaaattttatatttagaaaattgatgttaaatattaagtagtatgattttattttgaagtagtgttttagttattgttttggaatggttttaaagtaagtgatatattgttgaaagtgttgtttttgatattaaatgtttattaaaaatttttattaagatataaagttttttattattattttttggtaagggtttaaatttgagatgaaattttttaaagtggttaaagtatttattgttttttttgtttgatgtttttaattagtttattttatagaaggagtattttttttaagtggttgtagattgagatatttttataggtttagttgttgagttaattatatttaaaaaatgtatttgttttttggtttatggtgcgtaatgtattttttttataaattgtaaattgataaaatttttttgttattttaaaattgtttaaagtatttatttttttatattttttgtaaggaatttttttgagtatttttaatttaattgttttttgaaaaatattttaaagaaattttagaagtggtaaagtttagaggagttttataaatataaagtgttgaagtaaaatatgatgttaaatggtgataagagatttaaaattagattttattgtgataagaatgtgataaagtttgattgtaatttttatatttttttttagaaaattatgttatagaaaaatgtttttaagtagtaaaataaagttattttaaaaaataattttttatgtgtattttttaataatttaagtgttatgaagttttttaattgagatttttaatcgtaaatagtttttgttttttgtattatgtttagattttatttaatgtaattagaatataaatttttatgtattgaggattttgattatatagatgagatattttttagttttagttggtgttttttattttttgttttttttgattttatttatatattttttgtttttattagatgatttttttttagaacggattgggagagcgaggttcgggtttttttttatttatttgtatcgatgtcgtttcgagtttttagtattgggtcgcgtatgatagtattttagtgggtgcggagcgggatagcgcgtcgggggcgtggtaggggcgtggtttgttcgcggggcggggagtgcggggcggggttttcgcggagcgtagcgagcgggtatattttaggttagttgttgcgagtcgagtcgggcggcggaggcggcggcggcggcggtagtggcggtagtggcggtagtggcggtagcggtagtagttgtagtagtggtggttagagcggatgtttgcgggttttttgcggttttattagtttttttcgtttcgtttagtcgtttatttttttcggttagggaagaagattagagggtgtttagttggaaaattttggtgttttagtttagggtttttttcgggaagagttaattgtttttaggtgaagtcggtgttcgcgggcggttcgtatatttcgtagtcggttcgtatcgttcgagagtttcggtcgttgtgttttttacgtttgtagtttagttagggcgcgtagggcgagtggggtttattggcgggtaaaggggattaggacggcgaggatggacgtatagatttggttcgtgggttttcgttgttttttttttttggttttggttgggttcgttcgtagcgagggcgtgtagatttgcgaagaagttcggaaatttttttagtggcggttgttgggagttgttagggggttgtcggattcgtcgcgggtaggtaaggggtaatgagggggtttttggattggcggcgttcgagttcggttttcgtttttttaggtttttttggtggtattcgtgggaagatgatttttcgggttttgtagtcgcgtagggtgaatttcggggaggttttcggggatgtttggtgcgggtagtttgagtgtagcgtagcgtagttttggggatttttaattaagtttgcgacgaattttcgttttgggtatttgtttttcgttcggtttttttcgttttggaggatgagttggaaggaattaggaaagtagatattagggcgtgggggatacgtagtttaatttcgtttttttttcgagtaggaatttttttagtgttttatcggggatttcggtttattgtttttttataaggtggagggaattgaattgatcgttttaagtttggtattaaaaattataaatttgcgatatatttttttgttggagaatggggtatagataagggtagtcggttttttttgtaattaggatttggattttgtgtatttagagacgtgatttttagttgtttttttgtgttttcgtattaagttttgtttggaggaaatttaattatttagtgtgttttttagtattaaggtagtttttagtttgaaaagtgttagggtaataggcgattaaatcgaacgtattggggagttatttgatatggatgagatgtattagcgttttaaagggaaagatatagtttgtgtggttagcgtggattttgttttttgtgagcgttttttgtttgtgttttcgaattttgtttttcgtttttatcgtattaatttttttttgttggtgggagttttagtgtaggttttgtttggaagaataggttatagttgttaaacgtaatagtaggtgtttagagttaagtaagattttattagagttatgtatttttttagttgtgattatgaagttaatatagacgaatttgtgaggttattggttgaataaagaatttgtggaggacgtttaagtttaaagtttcgagttt

SEQ ID NO: 310 - DNA, 3001 bp, homo sapiens
ttgttataaagattatatgagtgaatttatttttataaaatatttagaatattatttggtttataagtattatatatatttttatggttttttttgtttttttttatagatataggtggtttttagataatttttttatatttggtggttagagtagaagagatttatgaagagtattgttttttgaaataaaattttatatttagaaaattgatgttaaatattaagtagtatgattttattttgaagtagtgttttagttattgttttggaatggttttaaagtaagtgatatattgttgaaagtgttgtttttgatattaaatgtttattaaaaatttttattaagatataaagttttttattattattttttggtaagggtttaaatttgagatgaaattttttaaagtggttaaagtatttattgttttttttgtttgatgtttttaattagtttattttatagaaggagtattttttttaagtggttgtagattgagatatttttataggtttagttgttgagttaattatatttaaaaaatgtatttgttttttggtttatggtgtgtaatgtattttttttataaattgtaaattgataaaatttttttgttattttaaaattgtttaaagtatttatttttttatattttttgtaaggaatttttttgagtatttttaatttaattgttttttgaaaaatattttaaagaaattttagaagtggtaaagtttagaggagttttataaatataaagtgttgaagtaaaatatgatgttaaatggtgataagagatttaaaattagattttattgtgataagaatgtgataaagtttgattgtaatttttatatttttttttagaaaattatgttatagaaaaatgtttttaagtagtaaaataaagttattttaaaaaataattttttatgtgtattttttaataatttaagtgttatgaagttttttaattgagatttttaattgtaaatagtttttgttttttgtattatgtttagattttatttaatgtaattagaatataaatttttatgtattgaggattttgattatatagatgagatattttttagttttagttggtgttttttattttttgttttttttgattttatttatatattttttgtttttattagatgatttttttttagaatggattgggagagtgaggtttgggtttttttttatttatttgtattgatgttgttttgagtttttagtattgggttgtgtatgatagtattttagtgggtgtggagtgggatagtgtgttgggggtgtggtaggggtgtggtttgtttgtggggtggggagtgtggggtggggtttttgtggagtgtagtgagtgggtatattttaggttagttgttgtgagttgagttgggtggtggaggtggtggtggtggtggtagtggtggtagtggtggtagtggtggtagtggtagtagttgtagtagtggtggttagagtggatgtttgtgggttttttgtggttttattagttttttttgttttgtttagttgtttattttttttggttagggaagaagattagagggtgtttagttggaaaattttggtgttttagtttagggttttttttgggaagagttaattgtttttaggtgaagttggtgtttgtgggtggtttgtatattttgtagttggtttgtattgtttgagagttttggttgttgtgttttttatgtttgtagtttagttagggtgtgtagggtgagtggggtttattggtgggtaaaggggattaggatggtgaggatggatgtatagatttggtttgtgggtttttgttgttttttttttttggttttggttgggtttgtttgtagtgagggtgtgtagatttgtgaagaagtttggaaatttttttagtggtggttgttgggagttgttagggggttgttggatttgttgtgggtaggtaaggggtaatgagggggtttttggattggtggtgtttgagtttggtttttgtttttttaggtttttttggtggtatttgtgggaagatgattttttgggttttgtagttgtgtagggtgaattttggggaggtttttggggatgtttggtgtgggtagtttgagtgtagtgtagtgtagttttggggatttttaattaagtttgtgatgaatttttgttttgggtatttgttttttgtttggttttttttgttttggaggatgagttggaaggaattaggaaagtagatattagggtgtgggggatatgtagtttaattttgttttttttttgagtaggaatttttttagtgttttattggggattttggtttattgtttttttataaggtggagggaattgaattgattgttttaagtttggtattaaaaattataaatttgtgatatatttttttgttggagaatggggtatagataagggtagttggttttttttgtaattaggatttggattttgtgtatttagagatgtgatttttagttgtttttttgtgtttttgtattaagttttgtttggaggaaatttaattatttagtgtgttttttagtattaaggtagtttttagtttgaaaagtgttagggtaataggtgattaaattgaatgtattggggagttatttgatatggatgagatgtattagtgttttaaagggaaagatatagtttgtgtggttagtgtggattttgttttttgtgagtgttttttgtttgtgtttttgaattttgttttttgtttttattgtattaatttttttttgttggtgggagttttagtgtaggttttgtttggaagaataggttatagttgttaaatgtaatagtaggtgtttagagttaagtaagattttattagagttatgtatttttttagttgtgattatgaagttaatatagatgaatttgtgaggttattggttgaataaagaatttgtggaggatgtttaagtttaaagttttgagttt

SEQ ID NO: 311 - DNA, 50 bp, homo sapiens
gcactgggccgcgtatgacagcatcttagtgggtgcggagcgggacagcg

SEQ ID NO: 312 - DNA, 50 bp, homo sapiens
gtattgggtcgcgtatgatagtattttagtgggtgcggagcgggatagcg

SEQ ID NO: 313 - DNA, 50 bp, homo sapiens
gtattgggttgtgtatgatagtattttagtgggtgtggagtgggatagtg

SEQ ID NO: 314 - DNA, 50 bp, homo sapiens
cgttgtttcgtttcgtatttattaagatgttgttatacgcggtttagtgt

SEQ ID NO: 315 - DNA, 50 bp, homo sapiens
tgttgttttgttttgtatttattaagatgttgttatatgtggtttagtgt

SEQ ID NO: 316 - DNA, 3001 bp, homo sapiens
ttggtgaaacctgatgggtttttctgtaccacagaatagtcaaggagagcctctggagaagagcatgcggtctggatttggaagcctcagtttgatttctggctttgtcacttaccttaggcattcagtaagtcacttcacctctgtgttcctgtttcctcatctgtaaaacaatgataatagtagtaactactttataaggttgttataaagattacatgagtgaattcatttccataaaatacttagaatattatctggcccataagcactatatacattctcatggtttttcttgtttcttttcatagatataggtggcttccagacaatctttccatacttggtggttagagcagaagagattcatgaagagcactgccctttgaaacaaaatctcatattcagaaaactgatgccaaacaccaagtagcatgatttcactctgaagcagtgtttcagccattgccctggaatggttttaaagcaagtgatatactgctgaaagtgctgcctttgatattaaatgttcattaaaaatcttcactaagacataaagtttttcactactatctcttggtaagggttcaaatttgagatgaaattccttaaagtggttaaagcattcattgtcccctctgcctgatgcttttaactagtttattttacagaaggagtactctcttcaagtggctgtagattgagacactcttacaggcttagttgttgagtcaaccacatttaaaaaatgcacctgccctttggtttatggtgcgtaatgcattcctctcataaactgtaaattgacaaaattcctttgccattttaaaattgcttaaagtatttatttttctatattccttgtaaggaactcccctgagcactcttaacttaattgctctctgaaaaatattttaaagaaattccagaagtggtaaagctcagaggagccccacaaatacaaagtgctgaagtaaaatatgatgctaaatggtgataagagacttaaaactagatttcattgtgataagaatgtgataaagtttgattgtaattcttatacctcctttcagaaaatcatgttatagaaaaatgttcctaagcagtaaaacaaagccattttaaaaaataacttctcatgtgcactctttaacaacctaagtgttatgaagtctctcaattgagatctttaaccgtaaatagtttttgccttttgtattatgtccagatcctatttaatgcaattagaatacaaattcctatgtactgaggaccttgattacatagatgagatatttcttagttccagttggtgtttctcatctcttgtcttctctgaccctatttatacattctctgtttttatcagatgattcttccccagaacggactgggagagcgaggtccgggtttccttctatttatttgcatcgatgtcgctccgagtcttcagcactgggccgcgtatgacagcatcttagtgggtgcggagcgggacagcgcgccgggggcgtggcaggggcgtggcctgtccgcggggcggggagtgcggggcggggcttccgcggagcgcagcgagcgggcacatcccaggttagctgctgcgagccgagccgggcggcggaggcggcggcggcggcggcagtggcggcagtggcggcagtggcggcagcggcagcagttgcagcagtggtggccagagcggatgcttgcgggctccctgcggctccactagttttcttcgccccgcccagccgcccactcttctcggctagggaagaagaccagagggtgctcagctggaaaactctggtgtctcagcttagggcctcctccgggaagagctaactgctcccaggtgaagccggtgcccgcgggcggtccgtacaccccgcagccggctcgcaccgctcgagagcctcggccgctgtgtcttccacgtctgcagctcagccagggcgcgcagggcgagtggggtccactggcgggtaaaggggaccaggacggcgaggatggacgcacagacctggcccgtgggctttcgctgcctcctccttctggccctggttgggtccgcccgcagcgagggcgtgcagacctgcgaagaagttcggaaacttttccagtggcggctgctgggagctgtcagggggctgccggattcgccgcgggcaggtaaggggcaatgagggggtctctggactggcggcgtccgagcccggccttcgctcccccaggctcccttggtggcactcgtgggaagatgacctttcgggccctgcagccgcgcagggtgaatcccggggaggcttccggggatgcttggtgcgggtagcctgagtgcagcgcagcgcagctctggggacccctaaccaagcctgcgacgaatccccgttctgggcatctgcttcccgcccggctcccttcgtcttggaggatgagttggaaggaaccaggaaagcagacatcagggcgtgggggacacgcagtctaactccgtttctcttccgagtaggaatttccccagtgccccaccggggatttcggtttactgctttctcataaggtggagggaattgaattgatcgccccaagtttggtactaaaaatcacaaacctgcgatatacccctttgctggagaatggggcacagacaagggcagccggtctcctctgtaattaggacttggaccctgtgcacccagagacgtgacccttagctgcccttctgtgccctcgtatcaagccctgcttggaggaaacccaaccacccagtgtgtctcccagcaccaaggtagtttttagcctgaaaagtgttagggcaacaggcgatcaaaccgaacgtactggggagtcacttgacatggatgagatgtaccagcgttccaaagggaaagatacagtttgtgtggccagcgtggatcttgcttcctgtgagcgccttttgcctgtgctttcgaaccctgctccccgtttccaccgcaccaatttccttctgctg

SEQ ID NO: 317 - DNA, 3001 bp, homo sapiens
ttggtgaaatttgatgggtttttttgtattatagaatagttaaggagagtttttggagaagagtatgcggtttggatttggaagttttagtttgatttttggttttgttatttattttaggtatttagtaagttattttatttttgtgtttttgtttttttatttgtaaaataatgataatagtagtaattattttataaggttgttataaagattatatgagtgaatttatttttataaaatatttagaatattatttggtttataagtattatatatatttttatggttttttttgtttttttttatagatataggtggtttttagataatttttttatatttggtggttagagtagaagagatttatgaagagtattgttttttgaaataaaattttatatttagaaaattgatgttaaatattaagtagtatgattttattttgaagtagtgttttagttattgttttggaatggttttaaagtaagtgatatattgttgaaagtgttgtttttgatattaaatgtttattaaaaatttttattaagatataaagttttttattattattttttggtaagggtttaaatttgagatgaaattttttaaagtggttaaagtatttattgttttttttgtttgatgtttttaattagtttattttatagaaggagtattttttttaagtggttgtagattgagatatttttataggtttagttgttgagttaattatatttaaaaaatgtatttgttttttggtttatggtgcgtaatgtattttttttataaattgtaaattgataaaatttttttgttattttaaaattgtttaaagtatttatttttttatattttttgtaaggaatttttttgagtatttttaatttaattgttttttgaaaaatattttaaagaaattttagaagtggtaaagtttagaggagttttataaatataaagtgttgaagtaaaatatgatgttaaatggtgataagagatttaaaattagattttattgtgataagaatgtgataaagtttgattgtaatttttatatttttttttagaaaattatgttatagaaaaatgtttttaagtagtaaaataaagttattttaaaaaataattttttatgtgtattttttaataatttaagtgttatgaagttttttaattgagatttttaatcgtaaatagtttttgttttttgtattatgtttagattttatttaatgtaattagaatataaatttttatgtattgaggattttgattatatagatgagatattttttagttttagttggtgttttttattttttgttttttttgattttatttatatattttttgtttttattagatgatttttttttagaacggattgggagagcgaggttcgggtttttttttatttatttgtatcgatgtcgtttcgagtttttagtattgggtcgcgtatgatagtattttagtgggtgcggagcgggatagcgcgtcgggggcgtggtaggggcgtggtttgttcgcggggcggggagtgcggggcggggttttcgcggagcgtagcgagcgggtatattttaggttagttgttgcgagtcgagtcgggcggcggaggcggcggcggcggcggtagtggcggtagtggcggtagtggcggtagcggtagtagttgtagtagtggtggttagagcggatgtttgcgggttttttgcggttttattagtttttttcgtttcgtttagtcgtttatttttttcggttagggaagaagattagagggtgtttagttggaaaattttggtgttttagtttagggtttttttcgggaagagttaattgtttttaggtgaagtcggtgttcgcgggcggttcgtatatttcgtagtcggttcgtatcgttcgagagtttcggtcgttgtgttttttacgtttgtagtttagttagggcgcgtagggcgagtggggtttattggcgggtaaaggggattaggacggcgaggatggacgtatagatttggttcgtgggttttcgttgttttttttttttggttttggttgggttcgttcgtagcgagggcgtgtagatttgcgaagaagttcggaaatttttttagtggcggttgttgggagttgttagggggttgtcggattcgtcgcgggtaggtaaggggtaatgagggggtttttggattggcggcgttcgagttcggttttcgtttttttaggtttttttggtggtattcgtgggaagatgatttttcgggttttgtagtcgcgtagggtgaatttcggggaggttttcggggatgtttggtgcgggtagtttgagtgtagcgtagcgtagttttggggatttttaattaagtttgcgacgaattttcgttttgggtatttgtttttcgttcggtttttttcgttttggaggatgagttggaaggaattaggaaagtagatattagggcgtgggggatacgtagtttaatttcgtttttttttcgagtaggaatttttttagtgttttatcggggatttcggtttattgtttttttataaggtggagggaattgaattgatcgttttaagtttggtattaaaaattataaatttgcgatatatttttttgttggagaatggggtatagataagggtagtcggttttttttgtaattaggatttggattttgtgtatttagagacgtgatttttagttgtttttttgtgttttcgtattaagttttgtttggaggaaatttaattatttagtgtgttttttagtattaaggtagtttttagtttgaaaagtgttagggtaataggcgattaaatcgaacgtattggggagttatttgatatggatgagatgtattagcgttttaaagggaaagatatagtttgtgtggttagcgtggattttgttttttgtgagcgttttttgtttgtgttttcgaattttgtttttcgtttttatcgtattaatttttttttgttg

SEQ ID NO: 318 - DNA, 3001 bp, homo sapiens
ttggtgaaatttgatgggtttttttgtattatagaatagttaaggagagtttttggagaagagtatgtggtttggatttggaagttttagtttgatttttggttttgttatttattttaggtatttagtaagttattttatttttgtgtttttgtttttttatttgtaaaataatgataatagtagtaattattttataaggttgttataaagattatatgagtgaatttatttttataaaatatttagaatattatttggtttataagtattatatatatttttatggttttttttgtttttttttatagatataggtggtttttagataatttttttatatttggtggttagagtagaagagatttatgaagagtattgttttttgaaataaaattttatatttagaaaattgatgttaaatattaagtagtatgattttattttgaagtagtgttttagttattgttttggaatggttttaaagtaagtgatatattgttgaaagtgttgtttttgatattaaatgtttattaaaaatttttattaagatataaagttttttattattattttttggtaagggtttaaatttgagatgaaattttttaaagtggttaaagtatttattgttttttttgtttgatgtttttaattagtttattttatagaaggagtattttttttaagtggttgtagattgagatatttttataggtttagttgttgagttaattatatttaaaaaatgtatttgttttttggtttatggtgtgtaatgtattttttttataaattgtaaattgataaaatttttttgttattttaaaattgtttaaagtatttatttttttatattttttgtaaggaatttttttgagtatttttaatttaattgttttttgaaaaatattttaaagaaattttagaagtggtaaagtttagaggagttttataaatataaagtgttgaagtaaaatatgatgttaaatggtgataagagatttaaaattagattttattgtgataagaatgtgataaagtttgattgtaatttttatatttttttttagaaaattatgttatagaaaaatgtttttaagtagtaaaataaagttattttaaaaaataattttttatgtgtattttttaataatttaagtgttatgaagttttttaattgagatttttaattgtaaatagtttttgttttttgtattatgtttagattttatttaatgtaattagaatataaatttttatgtattgaggattttgattatatagatgagatattttttagttttagttggtgttttttattttttgttttttttgattttatttatatattttttgtttttattagatgatttttttttagaatggattgggagagtgaggtttgggtttttttttatttatttgtattgatgttgttttgagtttttagtattgggttgtgtatgatagtattttagtgggtgtggagtgggatagtgtgttgggggtgtggtaggggtgtggtttgtttgtggggtggggagtgtggggtggggtttttgtggagtgtagtgagtgggtatattttaggttagttgttgtgagttgagttgggtggtggaggtggtggtggtggtggtagtggtggtagtggtggtagtggtggtagtggtagtagttgtagtagtggtggttagagtggatgtttgtgggttttttgtggttttattagttttttttgttttgtttagttgtttattttttttggttagggaagaagattagagggtgtttagttggaaaattttggtgttttagtttagggttttttttgggaagagttaattgtttttaggtgaagttggtgtttgtgggtggtttgtatattttgtagttggtttgtattgtttgagagttttggttgttgtgttttttatgtttgtagtttagttagggtgtgtagggtgagtggggtttattggtgggtaaaggggattaggatggtgaggatggatgtatagatttggtttgtgggtttttgttgttttttttttttggttttggttgggtttgtttgtagtgagggtgtgtagatttgtgaagaagtttggaaatttttttagtggtggttgttgggagttgttagggggttgttggatttgttgtgggtaggtaaggggtaatgagggggtttttggattggtggtgtttgagtttggtttttgtttttttaggtttttttggtggtatttgtgggaagatgattttttgggttttgtagttgtgtagggtgaattttggggaggtttttggggatgtttggtgtgggtagtttgagtgtagtgtagtgtagttttggggatttttaattaagtttgtgatgaatttttgttttgggtatttgttttttgtttggttttttttgttttggaggatgagttggaaggaattaggaaagtagatattagggtgtgggggatatgtagtttaattttgttttttttttgagtaggaatttttttagtgttttattggggattttggtttattgtttttttataaggtggagggaattgaattgattgttttaagtttggtattaaaaattataaatttgtgatatatttttttgttggagaatggggtatagataagggtagttggttttttttgtaattaggatttggattttgtgtatttagagatgtgatttttagttgtttttttgtgtttttgtattaagttttgtttggaggaaatttaattatttagtgtgttttttagtattaaggtagtttttagtttgaaaagtgttagggtaataggtgattaaattgaatgtattggggagttatttgatatggatgagatgtattagtgttttaaagggaaagatatagtttgtgtggttagtgtggattttgttttttgtgagtgttttttgtttgtgtttttgaattttgttttttgtttttattgtattaatttttttttgttg

SEQ ID NO: 319 - DNA, 3001 bp, homo sapiens
tagtagaaggaaattggtgcggtggaaacggggagtagggttcgaaagtataggtaaaaggcgtttataggaagtaagatttacgttggttatataaattgtatttttttttttggaacgttggtatattttatttatgttaagtgattttttagtacgttcggtttgatcgtttgttgttttaatattttttaggttaaaaattattttggtgttgggagatatattgggtggttgggttttttttaagtagggtttgatacgagggtatagaagggtagttaagggttacgtttttgggtgtatagggtttaagttttaattatagaggagatcggttgtttttgtttgtgttttattttttagtaaaggggtatatcgtaggtttgtgatttttagtattaaatttggggcgattaatttaattttttttattttatgagaaagtagtaaatcgaaattttcggtggggtattggggaaatttttattcggaagagaaacggagttagattgcgtgttttttacgttttgatgtttgtttttttggttttttttaatttattttttaagacgaagggagtcgggcgggaagtagatgtttagaacggggattcgtcgtaggtttggttaggggtttttagagttgcgttgcgttgtatttaggttattcgtattaagtattttcggaagttttttcgggatttattttgcgcggttgtagggttcgaaaggttatttttttacgagtgttattaagggagtttgggggagcgaaggtcgggttcggacgtcgttagtttagagatttttttattgttttttatttgttcgcggcgaattcggtagttttttgatagtttttagtagtcgttattggaaaagttttcgaattttttcgtaggtttgtacgttttcgttgcgggcggatttaattagggttagaaggaggaggtagcgaaagtttacgggttaggtttgtgcgtttattttcgtcgttttggttttttttattcgttagtggattttattcgttttgcgcgttttggttgagttgtagacgtggaagatatagcggtcgaggttttcgagcggtgcgagtcggttgcggggtgtacggatcgttcgcgggtatcggttttatttgggagtagttagtttttttcggaggaggttttaagttgagatattagagttttttagttgagtattttttggtttttttttttagtcgagaagagtgggcggttgggcggggcgaagaaaattagtggagtcgtagggagttcgtaagtattcgttttggttattattgttgtaattgttgtcgttgtcgttattgtcgttattgtcgttattgtcgtcgtcgtcgtcgttttcgtcgttcggttcggttcgtagtagttaatttgggatgtgttcgttcgttgcgtttcgcggaagtttcgtttcgtatttttcgtttcgcggataggttacgtttttgttacgttttcggcgcgttgtttcgtttcgtatttattaagatgttgttatacgcggtttagtgttgaagattcggagcgatatcgatgtaaataaatagaaggaaattcggatttcgtttttttagttcgttttggggaagaattatttgataaaaatagagaatgtataaatagggttagagaagataagagatgagaaatattaattggaattaagaaatattttatttatgtaattaaggtttttagtatataggaatttgtattttaattgtattaaataggatttggatataatataaaaggtaaaaattatttacggttaaagattttaattgagagattttataatatttaggttgttaaagagtgtatatgagaagttattttttaaaatggttttgttttattgtttaggaatatttttttataatatgattttttgaaaggaggtataagaattataattaaattttattatatttttattataatgaaatttagttttaagttttttattattatttagtattatattttattttagtattttgtatttgtggggtttttttgagttttattatttttggaatttttttaaaatattttttagagagtaattaagttaagagtgtttaggggagttttttataaggaatatagaaaaataaatattttaagtaattttaaaatggtaaaggaattttgttaatttatagtttatgagaggaatgtattacgtattataaattaaagggtaggtgtattttttaaatgtggttgatttaataattaagtttgtaagagtgttttaatttatagttatttgaagagagtattttttttgtaaaataaattagttaaaagtattaggtagaggggataatgaatgttttaattattttaaggaattttattttaaatttgaatttttattaagagatagtagtgaaaaattttatgttttagtgaagatttttaatgaatatttaatattaaaggtagtatttttagtagtatattatttgttttaaaattattttagggtaatggttgaaatattgttttagagtgaaattatgttatttggtgtttggtattagttttttgaatatgagattttgttttaaagggtagtgttttttatgaattttttttgttttaattattaagtatggaaagattgtttggaagttatttatatttatgaaaagaaataagaaaaattatgagaatgtatatagtgtttatgggttagataatattttaagtattttatggaaatgaatttatttatgtaatttttataataattttataaagtagttattattattattattgttttatagatgaggaaataggaatatagaggtgaagtgatttattgaatgtttaaggtaagtgataaagttagaaattaaattgaggtttttaaatttagatcgtatgtttttttttagaggttttttttgattattttgtggtatagaaaaatttattaggttttattaa

SEQ ID NO: 320 - DNA, 3001 bp, homo sapiens
tagtagaaggaaattggtgtggtggaaatggggagtagggtttgaaagtataggtaaaaggtgtttataggaagtaagatttatgttggttatataaattgtatttttttttttggaatgttggtatattttatttatgttaagtgattttttagtatgtttggtttgattgtttgttgttttaatattttttaggttaaaaattattttggtgttgggagatatattgggtggttgggttttttttaagtagggtttgatatgagggtatagaagggtagttaagggttatgtttttgggtgtatagggtttaagttttaattatagaggagattggttgtttttgtttgtgttttattttttagtaaaggggtatattgtaggtttgtgatttttagtattaaatttggggtgattaatttaattttttttattttatgagaaagtagtaaattgaaatttttggtggggtattggggaaatttttatttggaagagaaatggagttagattgtgtgttttttatgttttgatgtttgtttttttggttttttttaatttattttttaagatgaagggagttgggtgggaagtagatgtttagaatggggatttgttgtaggtttggttaggggtttttagagttgtgttgtgttgtatttaggttatttgtattaagtatttttggaagtttttttgggatttattttgtgtggttgtagggtttgaaaggttatttttttatgagtgttattaagggagtttgggggagtgaaggttgggtttggatgttgttagtttagagatttttttattgttttttatttgtttgtggtgaatttggtagttttttgatagtttttagtagttgttattggaaaagtttttgaatttttttgtaggtttgtatgtttttgttgtgggtggatttaattagggttagaaggaggaggtagtgaaagtttatgggttaggtttgtgtgtttatttttgttgttttggttttttttatttgttagtggattttatttgttttgtgtgttttggttgagttgtagatgtggaagatatagtggttgaggtttttgagtggtgtgagttggttgtggggtgtatggattgtttgtgggtattggttttatttgggagtagttagttttttttggaggaggttttaagttgagatattagagttttttagttgagtattttttggtttttttttttagttgagaagagtgggtggttgggtggggtgaagaaaattagtggagttgtagggagtttgtaagtatttgttttggttattattgttgtaattgttgttgttgttgttattgttgttattgttgttattgttgttgttgttgttgtttttgttgtttggtttggtttgtagtagttaatttgggatgtgtttgtttgttgtgttttgtggaagttttgttttgtattttttgttttgtggataggttatgtttttgttatgtttttggtgtgttgttttgttttgtatttattaagatgttgttatatgtggtttagtgttgaagatttggagtgatattgatgtaaataaatagaaggaaatttggattttgtttttttagtttgttttggggaagaattatttgataaaaatagagaatgtataaatagggttagagaagataagagatgagaaatattaattggaattaagaaatattttatttatgtaattaaggtttttagtatataggaatttgtattttaattgtattaaataggatttggatataatataaaaggtaaaaattatttatggttaaagattttaattgagagattttataatatttaggttgttaaagagtgtatatgagaagttattttttaaaatggttttgttttattgtttaggaatatttttttataatatgattttttgaaaggaggtataagaattataattaaattttattatatttttattataatgaaatttagttttaagttttttattattatttagtattatattttattttagtattttgtatttgtggggtttttttgagttttattatttttggaatttttttaaaatattttttagagagtaattaagttaagagtgtttaggggagttttttataaggaatatagaaaaataaatattttaagtaattttaaaatggtaaaggaattttgttaatttatagtttatgagaggaatgtattatgtattataaattaaagggtaggtgtattttttaaatgtggttgatttaataattaagtttgtaagagtgttttaatttatagttatttgaagagagtattttttttgtaaaataaattagttaaaagtattaggtagaggggataatgaatgttttaattattttaaggaattttattttaaatttgaatttttattaagagatagtagtgaaaaattttatgttttagtgaagatttttaatgaatatttaatattaaaggtagtatttttagtagtatattatttgttttaaaattattttagggtaatggttgaaatattgttttagagtgaaattatgttatttggtgtttggtattagttttttgaatatgagattttgttttaaagggtagtgttttttatgaattttttttgttttaattattaagtatggaaagattgtttggaagttatttatatttatgaaaagaaataagaaaaattatgagaatgtatatagtgtttatgggttagataatattttaagtattttatggaaatgaatttatttatgtaatttttataataattttataaagtagttattattattattattgttttatagatgaggaaataggaatatagaggtgaagtgatttattgaatgtttaaggtaagtgataaagttagaaattaaattgaggtttttaaatttagattgtatgtttttttttagaggttttttttgattattttgtggtatagaaaaatttattaggttttattaa

SEQ ID NO: 321 - DNA, 50 bp, homo sapiens
cggcagcagcctccgtggcctccagcatccgacaagaagcttcagccatg

SEQ ID NO: 322 - DNA, 50 bp, homo sapiens
cggtagtagttttcgtggtttttagtattcgataagaagttttagttatg

SEQ ID NO: 323 - DNA, 50 bp, homo sapiens
tggtagtagtttttgtggtttttagtatttgataagaagttttagttatg

SEQ ID NO: 324 - DNA, 50 bp, homo sapiens
tatggttgaagttttttgtcggatgttggaggttacggaggttgttgtcg

SEQ ID NO: 325 - DNA, 50 bp, homo sapiens
tatggttgaagttttttgttggatgttggaggttatggaggttgttgttg

SEQ ID NO: 326 - DNA, 3001 bp, homo sapiens
atactctccagctgccagctattgcagttgccatccttgttactatagtggtgagtatctctgcctgtcatgcgtgagagagggggtcgattccccgacggggaggtcacgggaaattgtgtgaggattttgtcaaccttcagaagtctcagaaatgtctccttgttttggctttcagcggaaatccgaacgccagcagatctgaatggaatgttctggattgaagaaagtgggaaatggcctcaattcacaaagtcacaacctgataaaaaccagtgtgactttactgcccagtgaacccatctcgtcctccagcctttaggaggtaggttggactggagcctgcagtagtttactctccacctgagtcctggtctccagctgggaacccacttaggccataaagaaaaacgcacactgtgcctctccaccgggcctctggagacgaggctcctcggggatacaaacagtggggagaacatgagggacatcccgaccgtactctgcgtcctcctttcccaggtgttgcgttctctcttgggctgagtggcgaggtctctcccgagtcccagggccacagtgcaatgtcacatctcctttgtggaaagtgactggtaaaggagagagaacaaaactggaggaatgtaaagtcttcagccacctggtttaatttattcaagagtgattaatcctagatgagaaaaagaattgaaatggatcggaaaaaaatgaaagtgcattggccgggaatcgaacccgggcctcccgcgtggcaggcgagaattctaccactgaaccaccaatgctactgtcagctaaagacctgcagtattgtctcttaaagctcactatctctggccattcactaaggaaccaggcaccgtcttaaatcgcggtttggaaaatattttgttcaagataaaactgttttaagatatacgtgtatatatcttatatatctgtattcgcatggtaacatatcttcggccttcctgagccgctgggctctcagcggccctccaaggcagcccgcaggcccctgtgtgcctcagggatccgacctcccacagccccggggagaccttgcctctaaagttgctgcttttgcagcctctgccacaaccgcgcgtcctcagagccagcccggaggagctagaaccttccccgcatttctttcagcagcctgagtcagaggcgggctggcctggcgtagccgcccagcctcgcggctcatgccccgatctgcccgaaccttctcccggggtcagcgccgcgccgcgccacccggctgagtcagcccgggcgggcgagaggctctcaactgggcgggaaggtgcgggaaggtgcggaaaggttcgcgaaagttcgcggcggcgggggtcgggtgaggcgcaaaaggataaaaagccggtggaagcggagctgagcagatccgagccgggctggctgcagagaaaccgcagggagagcctcactgctgagcgcccctcgacggcggagcggcagcagcctccgtggcctccagcatccgacaagaagcttcagccatgcaggccccacgggagctcgcggtgggcatcgacctgggcaccacctactcgtgcgtgggcgtgtttcagcagggccgcgtggagatcctggccaacgaccagggcaaccgcaccacgcccagctacgtggccttcaccgacaccgagcggctggtcggggacgcggccaagagccaggcggccctgaacccccacaacaccgtgttcgatgccaagcggctgatcgggcgcaagttcgcggacaccacggtgcagtcggacatgaagcactggcccttccgggtggtgagcgagggcggcaagcccaaggtgcgcgtatgctaccgcggggaggacaagacgttctaccccgaggagatctcgtccatggtgctgagcaagatgaaggagacggccgaggcgtacctgggccagcccgtgaagcacgcagtgatcaccgtgcccgcctatttcaatgactcgcagcgccaggccaccaaggacgcgggggccatcgcggggctcaacgtgttgcggatcatcaatgagcccacggcagctgccatcgcctatgggctggaccggcggggcgcgggagagcgcaacgtgctcatttttgacctgggtgggggcaccttcgatgtgtcggttctctccattgacgctggtgtctttgaggtgaaagccactgctggagatacccacctgggaggagaggacttcgacaaccggctcgtgaaccacttcatggaagaattccggcggaagcatgggaaggacctgagcgggaacaagcgtgccctgcgcaggctgcgcacagcctgtgagcgcgccaagcgcaccctgtcctccagcacccaggccaccctggagatagactccctgttcgagggcgtggacttctacacgtccatcactcgtgcccgctttgaggaactgtgctcagacctcttccgcagcaccctggagccggtggagaaggccctgcgggatgccaagctggacaaggcccagattcatgacgtcgtcctggtggggggctccacacgcatccccaaggtgcagaagttgctgcaggacttcttcaacggcaaggagctgaacaagagcatcaaccctgatgaggctgtggcctatggggctgctgtgcaggcggccgtgttgatgggggacaaatgtgagaaagtgcaggatctcctgctgctggatgtggctcccctgtctctggggctggagacagcaggtggggtgatgaccacgctgatccagaggaacgccactatccccaccaagcagacccagactttcaccacctactcggacaaccagcctggggtcttcatccaggtgtatgagggtgagagggccatgaccaaggacaacaacctgctggggcgttttgaactcagtggcatccctcctgccccacgtggagtcccccagatagaggtgacttttgacattgatgctaa

SEQ ID NO: 327 - DNA, 3001 bp, homo sapiens
atattttttagttgttagttattgtagttgttatttttgttattatagtggtgagtatttttgtttgttatgcgtgagagagggggtcgatttttcgacggggaggttacgggaaattgtgtgaggattttgttaatttttagaagttttagaaatgtttttttgttttggtttttagcggaaattcgaacgttagtagatttgaatggaatgttttggattgaagaaagtgggaaatggttttaatttataaagttataatttgataaaaattagtgtgattttattgtttagtgaatttatttcgttttttagtttttaggaggtaggttggattggagtttgtagtagtttattttttatttgagttttggtttttagttgggaatttatttaggttataaagaaaaacgtatattgtgtttttttatcgggtttttggagacgaggtttttcggggatataaatagtggggagaatatgagggatatttcgatcgtattttgcgttttttttttttaggtgttgcgtttttttttgggttgagtggcgaggtttttttcgagttttagggttatagtgtaatgttatattttttttgtggaaagtgattggtaaaggagagagaataaaattggaggaatgtaaagtttttagttatttggtttaatttatttaagagtgattaattttagatgagaaaaagaattgaaatggatcggaaaaaaatgaaagtgtattggtcgggaatcgaattcgggtttttcgcgtggtaggcgagaattttattattgaattattaatgttattgttagttaaagatttgtagtattgttttttaaagtttattatttttggttatttattaaggaattaggtatcgttttaaatcgcggtttggaaaatattttgtttaagataaaattgttttaagatatacgtgtatatattttatatatttgtattcgtatggtaatatattttcggtttttttgagtcgttgggtttttagcggttttttaaggtagttcgtaggtttttgtgtgttttagggattcgattttttatagtttcggggagattttgtttttaaagttgttgtttttgtagtttttgttataatcgcgcgtttttagagttagttcggaggagttagaatttttttcgtattttttttagtagtttgagttagaggcgggttggtttggcgtagtcgtttagtttcgcggtttatgtttcgatttgttcgaattttttttcggggttagcgtcgcgtcgcgttattcggttgagttagttcgggcgggcgagaggtttttaattgggcgggaaggtgcgggaaggtgcggaaaggttcgcgaaagttcgcggcggcgggggtcgggtgaggcgtaaaaggataaaaagtcggtggaagcggagttgagtagattcgagtcgggttggttgtagagaaatcgtagggagagttttattgttgagcgtttttcgacggcggagcggtagtagttttcgtggtttttagtattcgataagaagttttagttatgtaggttttacgggagttcgcggtgggtatcgatttgggtattatttattcgtgcgtgggcgtgttttagtagggtcgcgtggagattttggttaacgattagggtaatcgtattacgtttagttacgtggtttttatcgatatcgagcggttggtcggggacgcggttaagagttaggcggttttgaatttttataatatcgtgttcgatgttaagcggttgatcgggcgtaagttcgcggatattacggtgtagtcggatatgaagtattggttttttcgggtggtgagcgagggcggtaagtttaaggtgcgcgtatgttatcgcggggaggataagacgttttatttcgaggagatttcgtttatggtgttgagtaagatgaaggagacggtcgaggcgtatttgggttagttcgtgaagtacgtagtgattatcgtgttcgtttattttaatgattcgtagcgttaggttattaaggacgcgggggttatcgcggggtttaacgtgttgcggattattaatgagtttacggtagttgttatcgtttatgggttggatcggcggggcgcgggagagcgtaacgtgtttatttttgatttgggtgggggtattttcgatgtgtcggttttttttattgacgttggtgtttttgaggtgaaagttattgttggagatatttatttgggaggagaggatttcgataatcggttcgtgaattattttatggaagaatttcggcggaagtatgggaaggatttgagcgggaataagcgtgttttgcgtaggttgcgtatagtttgtgagcgcgttaagcgtattttgttttttagtatttaggttattttggagatagattttttgttcgagggcgtggatttttatacgtttattattcgtgttcgttttgaggaattgtgtttagatttttttcgtagtattttggagtcggtggagaaggttttgcgggatgttaagttggataaggtttagatttatgacgtcgttttggtggggggttttatacgtatttttaaggtgtagaagttgttgtaggatttttttaacggtaaggagttgaataagagtattaattttgatgaggttgtggtttatggggttgttgtgtaggcggtcgtgttgatgggggataaatgtgagaaagtgtaggattttttgttgttggatgtggtttttttgtttttggggttggagatagtaggtggggtgatgattacgttgatttagaggaacgttattatttttattaagtagatttagatttttattatttattcggataattagtttggggtttttatttaggtgtatgagggtgagagggttatgattaaggataataatttgttggggcgttttgaatttagtggtattttttttgttttacgtggagttttttagatagaggtgatttttgatattgatgttaa

SEQ ID NO: 328 - DNA, 3001 bp, homo sapiens
atattttttagttgttagttattgtagttgttatttttgttattatagtggtgagtatttttgtttgttatgtgtgagagagggggttgattttttgatggggaggttatgggaaattgtgtgaggattttgttaatttttagaagttttagaaatgtttttttgttttggtttttagtggaaatttgaatgttagtagatttgaatggaatgttttggattgaagaaagtgggaaatggttttaatttataaagttataatttgataaaaattagtgtgattttattgtttagtgaatttattttgttttttagtttttaggaggtaggttggattggagtttgtagtagtttattttttatttgagttttggtttttagttgggaatttatttaggttataaagaaaaatgtatattgtgtttttttattgggtttttggagatgaggttttttggggatataaatagtggggagaatatgagggatattttgattgtattttgtgttttttttttttaggtgttgtgtttttttttgggttgagtggtgaggttttttttgagttttagggttatagtgtaatgttatattttttttgtggaaagtgattggtaaaggagagagaataaaattggaggaatgtaaagtttttagttatttggtttaatttatttaagagtgattaattttagatgagaaaaagaattgaaatggattggaaaaaaatgaaagtgtattggttgggaattgaatttgggttttttgtgtggtaggtgagaattttattattgaattattaatgttattgttagttaaagatttgtagtattgttttttaaagtttattatttttggttatttattaaggaattaggtattgttttaaattgtggtttggaaaatattttgtttaagataaaattgttttaagatatatgtgtatatattttatatatttgtatttgtatggtaatatatttttggtttttttgagttgttgggtttttagtggttttttaaggtagtttgtaggtttttgtgtgttttagggatttgattttttatagttttggggagattttgtttttaaagttgttgtttttgtagtttttgttataattgtgtgtttttagagttagtttggaggagttagaattttttttgtattttttttagtagtttgagttagaggtgggttggtttggtgtagttgtttagttttgtggtttatgttttgatttgtttgaatttttttttggggttagtgttgtgttgtgttatttggttgagttagtttgggtgggtgagaggtttttaattgggtgggaaggtgtgggaaggtgtggaaaggtttgtgaaagtttgtggtggtgggggttgggtgaggtgtaaaaggataaaaagttggtggaagtggagttgagtagatttgagttgggttggttgtagagaaattgtagggagagttttattgttgagtgttttttgatggtggagtggtagtagtttttgtggtttttagtatttgataagaagttttagttatgtaggttttatgggagtttgtggtgggtattgatttgggtattatttatttgtgtgtgggtgtgttttagtagggttgtgtggagattttggttaatgattagggtaattgtattatgtttagttatgtggtttttattgatattgagtggttggttggggatgtggttaagagttaggtggttttgaatttttataatattgtgtttgatgttaagtggttgattgggtgtaagtttgtggatattatggtgtagttggatatgaagtattggtttttttgggtggtgagtgagggtggtaagtttaaggtgtgtgtatgttattgtggggaggataagatgttttattttgaggagattttgtttatggtgttgagtaagatgaaggagatggttgaggtgtatttgggttagtttgtgaagtatgtagtgattattgtgtttgtttattttaatgatttgtagtgttaggttattaaggatgtgggggttattgtggggtttaatgtgttgtggattattaatgagtttatggtagttgttattgtttatgggttggattggtggggtgtgggagagtgtaatgtgtttatttttgatttgggtgggggtatttttgatgtgttggttttttttattgatgttggtgtttttgaggtgaaagttattgttggagatatttatttgggaggagaggattttgataattggtttgtgaattattttatggaagaattttggtggaagtatgggaaggatttgagtgggaataagtgtgttttgtgtaggttgtgtatagtttgtgagtgtgttaagtgtattttgttttttagtatttaggttattttggagatagattttttgtttgagggtgtggatttttatatgtttattatttgtgtttgttttgaggaattgtgtttagattttttttgtagtattttggagttggtggagaaggttttgtgggatgttaagttggataaggtttagatttatgatgttgttttggtggggggttttatatgtatttttaaggtgtagaagttgttgtaggatttttttaatggtaaggagttgaataagagtattaattttgatgaggttgtggtttatggggttgttgtgtaggtggttgtgttgatgggggataaatgtgagaaagtgtaggattttttgttgttggatgtggtttttttgtttttggggttggagatagtaggtggggtgatgattatgttgatttagaggaatgttattatttttattaagtagatttagatttttattatttatttggataattagtttggggtttttatttaggtgtatgagggtgagagggttatgattaaggataataatttgttggggtgttttgaatttagtggtattttttttgttttatgtggagttttttagatagaggtgatttttgatattgatgttaa

SEQ ID NO: 329 - DNA, 3001 bp, homo sapiens
ttagtattaatgttaaaagttatttttatttgggggattttacgtggggtaggagggatgttattgagtttaaaacgttttagtaggttgttgtttttggttatggtttttttatttttatatatttggatgaagattttaggttggttgttcgagtaggtggtgaaagtttgggtttgtttggtggggatagtggcgtttttttggattagcgtggttattattttatttgttgtttttagttttagagataggggagttatatttagtagtaggagattttgtatttttttatatttgttttttattaatacggtcgtttgtatagtagttttataggttatagttttattagggttgatgtttttgtttagttttttgtcgttgaagaagttttgtagtaatttttgtattttggggatgcgtgtggagttttttattaggacgacgttatgaatttgggttttgtttagtttggtatttcgtagggttttttttatcggttttagggtgttgcggaagaggtttgagtatagttttttaaagcgggtacgagtgatggacgtgtagaagtttacgttttcgaatagggagtttatttttagggtggtttgggtgttggaggatagggtgcgtttggcgcgtttataggttgtgcgtagtttgcgtagggtacgtttgttttcgtttaggttttttttatgttttcgtcggaatttttttatgaagtggtttacgagtcggttgtcgaagttttttttttttaggtgggtatttttagtagtggtttttattttaaagatattagcgttaatggagagaatcgatatatcgaaggtgtttttatttaggttaaaaatgagtacgttgcgttttttcgcgtttcgtcggtttagtttataggcgatggtagttgtcgtgggtttattgatgattcgtaatacgttgagtttcgcgatggttttcgcgtttttggtggtttggcgttgcgagttattgaaataggcgggtacggtgattattgcgtgttttacgggttggtttaggtacgtttcggtcgttttttttattttgtttagtattatggacgagattttttcggggtagaacgttttgtttttttcgcggtagtatacgcgtattttgggtttgtcgttttcgtttattattcggaagggttagtgttttatgttcgattgtatcgtggtgttcgcgaatttgcgttcgattagtcgtttggtatcgaatacggtgttgtgggggtttagggtcgtttggtttttggtcgcgttttcgattagtcgttcggtgtcggtgaaggttacgtagttgggcgtggtgcggttgttttggtcgttggttaggatttttacgcggttttgttgaaatacgtttacgtacgagtaggtggtgtttaggtcgatgtttatcgcgagttttcgtggggtttgtatggttgaagttttttgtcggatgttggaggttacggaggttgttgtcgtttcgtcgtcgaggggcgtttagtagtgaggttttttttgcggtttttttgtagttagttcggttcggatttgtttagtttcgtttttatcggttttttatttttttgcgttttattcgattttcgtcgtcgcgaattttcgcgaattttttcgtattttttcgtattttttcgtttagttgagagtttttcgttcgttcgggttgatttagtcgggtggcgcggcgcggcgttgatttcgggagaaggttcgggtagatcggggtatgagtcgcgaggttgggcggttacgttaggttagttcgtttttgatttaggttgttgaaagaaatgcggggaaggttttagttttttcgggttggttttgaggacgcgcggttgtggtagaggttgtaaaagtagtaattttagaggtaaggttttttcggggttgtgggaggtcggatttttgaggtatataggggtttgcgggttgttttggagggtcgttgagagtttagcggtttaggaaggtcgaagatatgttattatgcgaatatagatatataagatatatatacgtatattttaaaatagttttattttgaataaaatattttttaaatcgcgatttaagacggtgtttggttttttagtgaatggttagagatagtgagttttaagagataatattgtaggtttttagttgatagtagtattggtggtttagtggtagaattttcgtttgttacgcgggaggttcgggttcgattttcggttaatgtatttttattttttttcgatttattttaatttttttttttatttaggattaattatttttgaataaattaaattaggtggttgaagattttatatttttttagttttgtttttttttttttattagttattttttataaaggagatgtgatattgtattgtggttttgggattcgggagagatttcgttatttagtttaagagagaacgtaatatttgggaaaggaggacgtagagtacggtcgggatgttttttatgttttttttattgtttgtattttcgaggagtttcgtttttagaggttcggtggagaggtatagtgtgcgtttttttttatggtttaagtgggtttttagttggagattaggatttaggtggagagtaaattattgtaggttttagtttaatttattttttaaaggttggaggacgagatgggtttattgggtagtaaagttatattggtttttattaggttgtgattttgtgaattgaggttattttttattttttttaatttagaatattttatttagatttgttggcgttcggattttcgttgaaagttaaaataaggagatatttttgagatttttgaaggttgataaaatttttatataatttttcgtgattttttcgtcggggaatcgatttttttttttacgtatgataggtagagatatttattattatagtaataaggatggtaattgtaatagttggtagttggagagtat

SEQ ID NO: 330 - DNA, 3001 bp, homo sapiens
ttagtattaatgttaaaagttatttttatttgggggattttatgtggggtaggagggatgttattgagtttaaaatgttttagtaggttgttgtttttggttatggtttttttatttttatatatttggatgaagattttaggttggttgtttgagtaggtggtgaaagtttgggtttgtttggtggggatagtggtgtttttttggattagtgtggttattattttatttgttgtttttagttttagagataggggagttatatttagtagtaggagattttgtatttttttatatttgttttttattaatatggttgtttgtatagtagttttataggttatagttttattagggttgatgtttttgtttagttttttgttgttgaagaagttttgtagtaatttttgtattttggggatgtgtgtggagttttttattaggatgatgttatgaatttgggttttgtttagtttggtattttgtagggttttttttattggttttagggtgttgtggaagaggtttgagtatagttttttaaagtgggtatgagtgatggatgtgtagaagtttatgtttttgaatagggagtttatttttagggtggtttgggtgttggaggatagggtgtgtttggtgtgtttataggttgtgtgtagtttgtgtagggtatgtttgtttttgtttaggttttttttatgtttttgttggaatttttttatgaagtggtttatgagttggttgttgaagttttttttttttaggtgggtatttttagtagtggtttttattttaaagatattagtgttaatggagagaattgatatattgaaggtgtttttatttaggttaaaaatgagtatgttgtgtttttttgtgttttgttggtttagtttataggtgatggtagttgttgtgggtttattgatgatttgtaatatgttgagttttgtgatggtttttgtgtttttggtggtttggtgttgtgagttattgaaataggtgggtatggtgattattgtgtgttttatgggttggtttaggtatgttttggttgttttttttattttgtttagtattatggatgagatttttttggggtagaatgttttgttttttttgtggtagtatatgtgtattttgggtttgttgtttttgtttattatttggaagggttagtgttttatgtttgattgtattgtggtgtttgtgaatttgtgtttgattagttgtttggtattgaatatggtgttgtgggggtttagggttgtttggtttttggttgtgtttttgattagttgtttggtgttggtgaaggttatgtagttgggtgtggtgtggttgttttggttgttggttaggatttttatgtggttttgttgaaatatgtttatgtatgagtaggtggtgtttaggttgatgtttattgtgagtttttgtggggtttgtatggttgaagttttttgttggatgttggaggttatggaggttgttgttgttttgttgttgaggggtgtttagtagtgaggttttttttgtggtttttttgtagttagtttggtttggatttgtttagttttgtttttattggttttttatttttttgtgttttatttgatttttgttgttgtgaatttttgtgaatttttttgtatttttttgtatttttttgtttagttgagagttttttgtttgtttgggttgatttagttgggtggtgtggtgtggtgttgattttgggagaaggtttgggtagattggggtatgagttgtgaggttgggtggttatgttaggttagtttgtttttgatttaggttgttgaaagaaatgtggggaaggttttagtttttttgggttggttttgaggatgtgtggttgtggtagaggttgtaaaagtagtaattttagaggtaaggtttttttggggttgtgggaggttggatttttgaggtatataggggtttgtgggttgttttggagggttgttgagagtttagtggtttaggaaggttgaagatatgttattatgtgaatatagatatataagatatatatatgtatattttaaaatagttttattttgaataaaatattttttaaattgtgatttaagatggtgtttggttttttagtgaatggttagagatagtgagttttaagagataatattgtaggtttttagttgatagtagtattggtggtttagtggtagaatttttgtttgttatgtgggaggtttgggtttgatttttggttaatgtatttttatttttttttgatttattttaatttttttttttatttaggattaattatttttgaataaattaaattaggtggttgaagattttatatttttttagttttgtttttttttttttattagttattttttataaaggagatgtgatattgtattgtggttttgggatttgggagagattttgttatttagtttaagagagaatgtaatatttgggaaaggaggatgtagagtatggttgggatgttttttatgttttttttattgtttgtatttttgaggagttttgtttttagaggtttggtggagaggtatagtgtgtgtttttttttatggtttaagtgggtttttagttggagattaggatttaggtggagagtaaattattgtaggttttagtttaatttattttttaaaggttggaggatgagatgggtttattgggtagtaaagttatattggtttttattaggttgtgattttgtgaattgaggttattttttattttttttaatttagaatattttatttagatttgttggtgtttggatttttgttgaaagttaaaataaggagatatttttgagatttttgaaggttgataaaatttttatataattttttgtgatttttttgttggggaattgatttttttttttatgtatgataggtagagatatttattattatagtaataaggatggtaattgtaatagttggtagttggagagtat

SEQ ID NO: 331 - DNA, 50 bp, homo sapiens
cgcagcccatccctgggagctcgggccacgcgcctcctcacgatccctcc

SEQ ID NO: 332 - DNA, 50 bp, homo sapiens
cgtagtttatttttgggagttcgggttacgcgtttttttacgattttttt

SEQ ID NO: 333 - DNA, 50 bp, homo sapiens
tgtagtttatttttgggagtttgggttatgtgtttttttatgattttttt

SEQ ID NO: 334 - DNA, 50 bp, homo sapiens
ggagggatcgtgaggaggcgcgtggttcgagtttttagggatgggttgcg

SEQ ID NO: 335 - DNA, 50 bp, homo sapiens
ggagggattgtgaggaggtgtgtggtttgagtttttagggatgggttgtg

SEQ ID NO: 336 - DNA, 3001 bp, homo sapiens
aagcacaatgccacatagtgtctgcccagaagagaaatctcactgccaccaggtccatccctcccatagcagtctattccccaccctcacattcactttctcatccttcctagaaatatagctcaaatcacagagattagtttcatagcagttatcaatatcttcctcacaacacaatggcacccaggctaacaggaagacttcagcaacaacctcccttcctccttggattgtgatgcctctgcagaagagtgtcactctgcaaacaccaactccaaagtactcttctaggggagaagtgagaatatagggtactcacggaagatcatggctaaggagtttgctggaaatccacaggttatcaatttcctaaaacagtgagggagaaagctctgtgtgctagctgctaaataagccacgagcagcttgacaagccaggaaatgttctggattattagaatttctctttcatagccatgttgccttgaatcccatcttaaattagaacagtaaaatcttcgatttcctgttatctttcttctgtatctttgttatgtgccctggacactctgtgtcctacaaacatttttaactgaacaacttgcagcgttctccaactagctctaagatcatcttggcaaagaaatggcaaggctgggattaactagaaaagccaccaggatttctatttttaaaaaaaggaaattaagagtttaaattcaattggatcaaccctacacacatatccagagtttcccagaactcaccactgtttgctggtgttgctgaaacttaagactgacattctggatccaaaaaaagcggaaggagccaatctttagctccgcctgcagcttccgctgacaccacttggtggccaaccggaccacaagccacctgcagaaaaattcctgttaattcataggacctttttccaatgatggtttccctcaccccttgctggtctttcaaagccttgcaaaaggtcgttcctgaaactggatctgagcaactctcctttcttccaaagcaccactctgtcatatacattcagccacgctgatcaagatcctagctcccgactgacccctccacccagatgaaaccagaaactgcaccctctaagttgaagacaaaaacaaaatccctcaaattgttatgaatcccagaggcagagagagaagaccccagcaagagtcaaagcggaggcggctctgtcacatgtgccatcacactccccagagggtctgtctgtctcctgctcccaccctccagacaggtatccacgagaaggcactttgaggtcagacccggcagctcgaatgctgttctccccagaccgatgctgcaggtgcccatcgcgcttggcgaaagggacatgcaggggtgggtggagggggaaagggaagccactgaaccaggccccttcctcacactcctattcagttcctggcctcagcatttcctcagaccccgcccgcttcctcagtctccccaactcgcagcccatccctgggagctcgggccacgcgcctcctcacgatccctcccctcgccgcgcgccccctccctccaccctacccactctgcctcacgcgcctcagtaaggcgcgcgccccctcctcagtctttcttcctcctctccgccccctccctcccgccgccgccgccgccgccggcgcggccgggaaccctcaccggcctagaaagagggcgctaagcgcaactagcagcaagaccaacagcgcggagaagaacagaggcatttaggtccgggtccggcccggcttggccccggcccccgccatgccgggccccgacgccggatccgcgcagcaccgccgcgggccgaccagctgcgcgcgcaggagcaacgctgagcgaggacgcgctggtgcgcacacgagccccgccttccgcagcccgccagccaaccaacggcctcccaccccagtcccgccctgtcctacgacgctgcagggccgacgggctgcgtgcgcgaggagcgggcgtggttccgggaggagggcgagggggagcggaccaagagctgaaacacgccccgggcgcacaccacggtgcccggaaccgcggggctcggggacccgcgggggtcggagtccgggcccactacctgggctggcggtggacctggctgactcatttcggtccggggagctcactttgaggggagttggagtccgcctagccacttaggcctggactcagggttctgcggaagttacacccctggtcagacgtggtagcactcccatcttattcaagatcctgtttgaaaattactgaggcagaaactaggaggtaattaaaaggcctcaaaaatctcgcctcattccatccacagaggaaactaatgaggttttgttttttttttctttgagacaaggactcgctacgttgcccagtctggtctcgaactcctgcaggctcaagggatcctcctgcctcagcctcctgagtagcttggactaaagacgcgtgtcacggttcctggccaatgagtttttacttcatttactgtttgaacactgttctggtccatctacttatggcacgaactgggccctgatggaggagaggaggagatactgcagaagtagtgaatattgttcttgccctttagcaaaaaatagtttatctgggaagcaaacataattacataaagtagacaatacatagtcagttttgcctgcttccttctgtgtagtttatctgggaagcaaacataattacataaaatagacaatacatagttttgcctgcttccttctctgtaaaatgagagaacaggacaaaggtccctcagcgttactgtgctaaggatcagtatctgaatgatgatctactgatacagcacaagctaaggaaatcctgacggtttcaaaataagtattatggaggaggtcatgtctcttttcataccccttcgctcccacgtcctaatctccatatatatccttcaagattttactcagagcct

SEQ ID NO: 337 - DNA, 3001 bp, homo sapiens
aagtataatgttatatagtgtttgtttagaagagaaattttattgttattaggtttattttttttatagtagtttattttttatttttatatttatttttttattttttttagaaatatagtttaaattatagagattagttttatagtagttattaatattttttttataatataatggtatttaggttaataggaagattttagtaataatttttttttttttttggattgtgatgtttttgtagaagagtgttattttgtaaatattaattttaaagtatttttttaggggagaagtgagaatatagggtatttacggaagattatggttaaggagtttgttggaaatttataggttattaattttttaaaatagtgagggagaaagttttgtgtgttagttgttaaataagttacgagtagtttgataagttaggaaatgttttggattattagaattttttttttatagttatgttgttttgaattttattttaaattagaatagtaaaattttcgattttttgttattttttttttgtatttttgttatgtgttttggatattttgtgttttataaatatttttaattgaataatttgtagcgttttttaattagttttaagattattttggtaaagaaatggtaaggttgggattaattagaaaagttattaggatttttatttttaaaaaaaggaaattaagagtttaaatttaattggattaattttatatatatatttagagttttttagaatttattattgtttgttggtgttgttgaaatttaagattgatattttggatttaaaaaaagcggaaggagttaatttttagtttcgtttgtagttttcgttgatattatttggtggttaatcggattataagttatttgtagaaaaatttttgttaatttataggatttttttttaatgatggttttttttattttttgttggttttttaaagttttgtaaaaggtcgtttttgaaattggatttgagtaattttttttttttttaaagtattattttgttatatatatttagttacgttgattaagattttagttttcgattgatttttttatttagatgaaattagaaattgtattttttaagttgaagataaaaataaaattttttaaattgttatgaattttagaggtagagagagaagattttagtaagagttaaagcggaggcggttttgttatatgtgttattatattttttagagggtttgtttgttttttgtttttattttttagataggtatttacgagaaggtattttgaggttagattcggtagttcgaatgttgttttttttagatcgatgttgtaggtgtttatcgcgtttggcgaaagggatatgtaggggtgggtggagggggaaagggaagttattgaattaggttttttttttatatttttatttagtttttggttttagtatttttttagatttcgttcgtttttttagtttttttaattcgtagtttatttttgggagttcgggttacgcgtttttttacgattttttttttcgtcgcgcgttttttttttttattttatttattttgttttacgcgttttagtaaggcgcgcgttttttttttagtttttttttttttttttcgttttttttttttcgtcgtcgtcgtcgtcgtcggcgcggtcgggaatttttatcggtttagaaagagggcgttaagcgtaattagtagtaagattaatagcgcggagaagaatagaggtatttaggttcgggttcggttcggtttggtttcggttttcgttatgtcgggtttcgacgtcggattcgcgtagtatcgtcgcgggtcgattagttgcgcgcgtaggagtaacgttgagcgaggacgcgttggtgcgtatacgagtttcgtttttcgtagttcgttagttaattaacggttttttattttagtttcgttttgttttacgacgttgtagggtcgacgggttgcgtgcgcgaggagcgggcgtggtttcgggaggagggcgagggggagcggattaagagttgaaatacgtttcgggcgtatattacggtgttcggaatcgcggggttcggggattcgcgggggtcggagttcgggtttattatttgggttggcggtggatttggttgatttatttcggttcggggagtttattttgaggggagttggagttcgtttagttatttaggtttggatttagggttttgcggaagttatatttttggttagacgtggtagtatttttattttatttaagattttgtttgaaaattattgaggtagaaattaggaggtaattaaaaggttttaaaaatttcgttttattttatttatagaggaaattaatgaggttttgttttttttttttttgagataaggattcgttacgttgtttagtttggtttcgaatttttgtaggtttaagggatttttttgttttagttttttgagtagtttggattaaagacgcgtgttacggtttttggttaatgagtttttattttatttattgtttgaatattgttttggtttatttatttatggtacgaattgggttttgatggaggagaggaggagatattgtagaagtagtgaatattgtttttgttttttagtaaaaaatagtttatttgggaagtaaatataattatataaagtagataatatatagttagttttgtttgtttttttttgtgtagtttatttgggaagtaaatataattatataaaatagataatatatagttttgtttgtttttttttttgtaaaatgagagaataggataaaggttttttagcgttattgtgttaaggattagtatttgaatgatgatttattgatatagtataagttaaggaaattttgacggttttaaaataagtattatggaggaggttatgtttttttttatattttttcgtttttacgttttaatttttatatatattttttaagattttatttagagttt

SEQ ID NO: 338 - DNA, 3001 bp, homo sapiens
aagtataatgttatatagtgtttgtttagaagagaaattttattgttattaggtttattttttttatagtagtttattttttatttttatatttatttttttattttttttagaaatatagtttaaattatagagattagttttatagtagttattaatattttttttataatataatggtatttaggttaataggaagattttagtaataatttttttttttttttggattgtgatgtttttgtagaagagtgttattttgtaaatattaattttaaagtatttttttaggggagaagtgagaatatagggtatttatggaagattatggttaaggagtttgttggaaatttataggttattaattttttaaaatagtgagggagaaagttttgtgtgttagttgttaaataagttatgagtagtttgataagttaggaaatgttttggattattagaattttttttttatagttatgttgttttgaattttattttaaattagaatagtaaaatttttgattttttgttattttttttttgtatttttgttatgtgttttggatattttgtgttttataaatatttttaattgaataatttgtagtgttttttaattagttttaagattattttggtaaagaaatggtaaggttgggattaattagaaaagttattaggatttttatttttaaaaaaaggaaattaagagtttaaatttaattggattaattttatatatatatttagagttttttagaatttattattgtttgttggtgttgttgaaatttaagattgatattttggatttaaaaaaagtggaaggagttaatttttagttttgtttgtagtttttgttgatattatttggtggttaattggattataagttatttgtagaaaaatttttgttaatttataggatttttttttaatgatggttttttttattttttgttggttttttaaagttttgtaaaaggttgtttttgaaattggatttgagtaattttttttttttttaaagtattattttgttatatatatttagttatgttgattaagattttagtttttgattgatttttttatttagatgaaattagaaattgtattttttaagttgaagataaaaataaaattttttaaattgttatgaattttagaggtagagagagaagattttagtaagagttaaagtggaggtggttttgttatatgtgttattatattttttagagggtttgtttgttttttgtttttattttttagataggtatttatgagaaggtattttgaggttagatttggtagtttgaatgttgttttttttagattgatgttgtaggtgtttattgtgtttggtgaaagggatatgtaggggtgggtggagggggaaagggaagttattgaattaggttttttttttatatttttatttagtttttggttttagtatttttttagattttgtttgtttttttagtttttttaatttgtagtttatttttgggagtttgggttatgtgtttttttatgatttttttttttgttgtgtgttttttttttttattttatttattttgttttatgtgttttagtaaggtgtgtgttttttttttagttttttttttttttttttgtttttttttttttgttgttgttgttgttgttggtgtggttgggaatttttattggtttagaaagagggtgttaagtgtaattagtagtaagattaatagtgtggagaagaatagaggtatttaggtttgggtttggtttggtttggttttggtttttgttatgttgggttttgatgttggatttgtgtagtattgttgtgggttgattagttgtgtgtgtaggagtaatgttgagtgaggatgtgttggtgtgtatatgagttttgttttttgtagtttgttagttaattaatggttttttattttagttttgttttgttttatgatgttgtagggttgatgggttgtgtgtgtgaggagtgggtgtggttttgggaggagggtgagggggagtggattaagagttgaaatatgttttgggtgtatattatggtgtttggaattgtggggtttggggatttgtgggggttggagtttgggtttattatttgggttggtggtggatttggttgatttattttggtttggggagtttattttgaggggagttggagtttgtttagttatttaggtttggatttagggttttgtggaagttatatttttggttagatgtggtagtatttttattttatttaagattttgtttgaaaattattgaggtagaaattaggaggtaattaaaaggttttaaaaattttgttttattttatttatagaggaaattaatgaggttttgttttttttttttttgagataaggatttgttatgttgtttagtttggttttgaatttttgtaggtttaagggatttttttgttttagttttttgagtagtttggattaaagatgtgtgttatggtttttggttaatgagtttttattttatttattgtttgaatattgttttggtttatttatttatggtatgaattgggttttgatggaggagaggaggagatattgtagaagtagtgaatattgtttttgttttttagtaaaaaatagtttatttgggaagtaaatataattatataaagtagataatatatagttagttttgtttgtttttttttgtgtagtttatttgggaagtaaatataattatataaaatagataatatatagttttgtttgtttttttttttgtaaaatgagagaataggataaaggttttttagtgttattgtgttaaggattagtatttgaatgatgatttattgatatagtataagttaaggaaattttgatggttttaaaataagtattatggaggaggttatgtttttttttatatttttttgtttttatgttttaatttttatatatattttttaagattttatttagagttt

SEQ ID NO: 339 - DNA, 3001 bp, homo sapiens
aggttttgagtaaaattttgaaggatatatatggagattaggacgtgggagcgaaggggtatgaaaagagatatgattttttttataatatttattttgaaatcgttaggatttttttagtttgtgttgtattagtagattattatttagatattgatttttagtatagtaacgttgagggatttttgttttgtttttttattttatagagaaggaagtaggtaaaattatgtattgtttattttatgtaattatgtttgttttttagataaattatatagaaggaagtaggtaaaattgattatgtattgtttattttatgtaattatgtttgttttttagataaattattttttgttaaagggtaagaataatatttattatttttgtagtattttttttttttttttattagggtttagttcgtgttataagtagatggattagaatagtgtttaaatagtaaatgaagtaaaaatttattggttaggaatcgtgatacgcgtttttagtttaagttatttaggaggttgaggtaggaggattttttgagtttgtaggagttcgagattagattgggtaacgtagcgagtttttgttttaaagaaaaaaaaaataaaattttattagttttttttgtggatggaatgaggcgagatttttgaggttttttaattattttttagtttttgttttagtaatttttaaataggattttgaataagatgggagtgttattacgtttgattaggggtgtaattttcgtagaattttgagtttaggtttaagtggttaggcggattttaattttttttaaagtgagtttttcggatcgaaatgagttagttaggtttatcgttagtttaggtagtgggttcggatttcgattttcgcgggttttcgagtttcgcggtttcgggtatcgtggtgtgcgttcggggcgtgttttagtttttggttcgttttttttcgtttttttttcggaattacgttcgtttttcgcgtacgtagttcgtcggttttgtagcgtcgtaggatagggcgggattggggtgggaggtcgttggttggttggcgggttgcggaaggcggggttcgtgtgcgtattagcgcgttttcgtttagcgttgtttttgcgcgcgtagttggtcggttcgcggcggtgttgcgcggattcggcgtcggggttcggtatggcgggggtcggggttaagtcgggtcggattcggatttaaatgtttttgttttttttcgcgttgttggttttgttgttagttgcgtttagcgttttttttttaggtcggtgagggttttcggtcgcgtcggcggcggcggcggcggcgggagggagggggcggagaggaggaagaaagattgaggagggggcgcgcgttttattgaggcgcgtgaggtagagtgggtagggtggagggagggggcgcgcggcgaggggagggatcgtgaggaggcgcgtggttcgagtttttagggatgggttgcgagttggggagattgaggaagcgggcggggtttgaggaaatgttgaggttaggaattgaataggagtgtgaggaaggggtttggtttagtggtttttttttttttttttatttatttttgtatgtttttttcgttaagcgcgatgggtatttgtagtatcggtttggggagaatagtattcgagttgtcgggtttgattttaaagtgttttttcgtggatatttgtttggagggtgggagtaggagatagatagattttttggggagtgtgatggtatatgtgatagagtcgttttcgttttgatttttgttggggttttttttttttgtttttgggatttataataatttgagggattttgtttttgtttttaatttagagggtgtagtttttggttttatttgggtggaggggttagtcgggagttaggattttgattagcgtggttgaatgtatatgatagagtggtgttttggaagaaaggagagttgtttagatttagttttaggaacgattttttgtaaggttttgaaagattagtaaggggtgagggaaattattattggaaaaaggttttatgaattaataggaatttttttgtaggtggtttgtggttcggttggttattaagtggtgttagcggaagttgtaggcggagttaaagattggtttttttcgttttttttggatttagaatgttagttttaagttttagtaatattagtaaatagtggtgagttttgggaaattttggatatgtgtgtagggttgatttaattgaatttaaatttttaattttttttttttaaaaatagaaattttggtggtttttttagttaattttagttttgttatttttttgttaagatgattttagagttagttggagaacgttgtaagttgtttagttaaaaatgtttgtaggatatagagtgtttagggtatataataaagatatagaagaaagataataggaaatcgaagattttattgttttaatttaagatgggatttaaggtaatatggttatgaaagagaaattttaataatttagaatattttttggtttgttaagttgttcgtggtttatttagtagttagtatatagagtttttttttttattgttttaggaaattgataatttgtggatttttagtaaattttttagttatgatttttcgtgagtattttatatttttattttttttttagaagagtattttggagttggtgtttgtagagtgatatttttttgtagaggtattataatttaaggaggaagggaggttgttgttgaagtttttttgttagtttgggtgttattgtgttgtgaggaagatattgataattgttatgaaattaatttttgtgatttgagttatatttttaggaaggatgagaaagtgaatgtgagggtggggaatagattgttatgggagggatggatttggtggtagtgagattttttttttgggtagatattatgtggtattgtgttt

SEQ ID NO: 340 - DNA, 3001 bp, homo sapiens
aggttttgagtaaaattttgaaggatatatatggagattaggatgtgggagtgaaggggtatgaaaagagatatgattttttttataatatttattttgaaattgttaggatttttttagtttgtgttgtattagtagattattatttagatattgatttttagtatagtaatgttgagggatttttgttttgtttttttattttatagagaaggaagtaggtaaaattatgtattgtttattttatgtaattatgtttgttttttagataaattatatagaaggaagtaggtaaaattgattatgtattgtttattttatgtaattatgtttgttttttagataaattattttttgttaaagggtaagaataatatttattatttttgtagtattttttttttttttttattagggtttagtttgtgttataagtagatggattagaatagtgtttaaatagtaaatgaagtaaaaatttattggttaggaattgtgatatgtgtttttagtttaagttatttaggaggttgaggtaggaggattttttgagtttgtaggagtttgagattagattgggtaatgtagtgagtttttgttttaaagaaaaaaaaaataaaattttattagttttttttgtggatggaatgaggtgagatttttgaggttttttaattattttttagtttttgttttagtaatttttaaataggattttgaataagatgggagtgttattatgtttgattaggggtgtaatttttgtagaattttgagtttaggtttaagtggttaggtggattttaattttttttaaagtgagttttttggattgaaatgagttagttaggtttattgttagtttaggtagtgggtttggattttgatttttgtgggtttttgagttttgtggttttgggtattgtggtgtgtgtttggggtgtgttttagtttttggtttgtttttttttgttttttttttggaattatgtttgttttttgtgtatgtagtttgttggttttgtagtgttgtaggatagggtgggattggggtgggaggttgttggttggttggtgggttgtggaaggtggggtttgtgtgtgtattagtgtgtttttgtttagtgttgtttttgtgtgtgtagttggttggtttgtggtggtgttgtgtggatttggtgttggggtttggtatggtgggggttggggttaagttgggttggatttggatttaaatgtttttgtttttttttgtgttgttggttttgttgttagttgtgtttagtgttttttttttaggttggtgagggtttttggttgtgttggtggtggtggtggtggtgggagggagggggtggagaggaggaagaaagattgaggagggggtgtgtgttttattgaggtgtgtgaggtagagtgggtagggtggagggagggggtgtgtggtgaggggagggattgtgaggaggtgtgtggtttgagtttttagggatgggttgtgagttggggagattgaggaagtgggtggggtttgaggaaatgttgaggttaggaattgaataggagtgtgaggaaggggtttggtttagtggtttttttttttttttttatttatttttgtatgttttttttgttaagtgtgatgggtatttgtagtattggtttggggagaatagtatttgagttgttgggtttgattttaaagtgtttttttgtggatatttgtttggagggtgggagtaggagatagatagattttttggggagtgtgatggtatatgtgatagagttgtttttgttttgatttttgttggggttttttttttttgtttttgggatttataataatttgagggattttgtttttgtttttaatttagagggtgtagtttttggttttatttgggtggaggggttagttgggagttaggattttgattagtgtggttgaatgtatatgatagagtggtgttttggaagaaaggagagttgtttagatttagttttaggaatgattttttgtaaggttttgaaagattagtaaggggtgagggaaattattattggaaaaaggttttatgaattaataggaatttttttgtaggtggtttgtggtttggttggttattaagtggtgttagtggaagttgtaggtggagttaaagattggttttttttgttttttttggatttagaatgttagttttaagttttagtaatattagtaaatagtggtgagttttgggaaattttggatatgtgtgtagggttgatttaattgaatttaaatttttaattttttttttttaaaaatagaaattttggtggtttttttagttaattttagttttgttatttttttgttaagatgattttagagttagttggagaatgttgtaagttgtttagttaaaaatgtttgtaggatatagagtgtttagggtatataataaagatatagaagaaagataataggaaattgaagattttattgttttaatttaagatgggatttaaggtaatatggttatgaaagagaaattttaataatttagaatattttttggtttgttaagttgtttgtggtttatttagtagttagtatatagagtttttttttttattgttttaggaaattgataatttgtggatttttagtaaattttttagttatgattttttgtgagtattttatatttttattttttttttagaagagtattttggagttggtgtttgtagagtgatatttttttgtagaggtattataatttaaggaggaagggaggttgttgttgaagtttttttgttagtttgggtgttattgtgttgtgaggaagatattgataattgttatgaaattaatttttgtgatttgagttatatttttaggaaggatgagaaagtgaatgtgagggtggggaatagattgttatgggagggatggatttggtggtagtgagattttttttttgggtagatattatgtggtattgtgttt

SEQ ID NO: 341 - DNA, 50 bp, homo sapiens
accagcctggccagattatcctgggatgcctgggcgaatacactgagtcg

SEQ ID NO: 342 - DNA, 50 bp, homo sapiens
attagtttggttagattattttgggatgtttgggcgaatatattgagtcg

SEQ ID NO: 343 - DNA, 50 bp, homo sapiens
attagtttggttagattattttgggatgtttgggtgaatatattgagttg

SEQ ID NO: 344 - DNA, 50 bp, homo sapiens
cgatttagtgtattcgtttaggtattttaggataatttggttaggttggt

SEQ ID NO: 345 - DNA, 50 bp, homo sapiens
tgatttagtgtatttgtttaggtattttaggataatttggttaggttggt

SEQ ID NO: 346 - DNA, 3001 bp, homo sapiens
ttgcaatcccctgttaacagtaagcatcagacaagtgaggggtgctaacctgcagactgccggcatgcttctccagcattaggggacgaccaggttgagcttgtgctgggagagcgtcctgtctgagggtagagacatagcccctgccttcagagactcccagcctgatagaagaaacagtctctgccctggagagccccttgtccaagggtatagagagttattgcaggctcaagaaagagacaaaagtcacttgcgatgcatgcagttagcaaatatctattgagggccctctctgtatgtgcccagcaatggagtgggtgccaagggtacagggggaagggggcctgtccctgtcctcaaagtgctgtacctgagcagtcacaaaatagtatggtggtgggtgccacgagacaagaaggtggggcccccaagcaggctgtctggatgtgctgccacctggaagtcccctctctgcacccctggcacttcccaggtgcatccaccttctgcagctcccatttcgtcctccttgctcatagctggttgcttacctaaggtctctgaccagtccatagcctattcacctcaaaaccctgcgctgaggaagcgctcagtgaccgaggaaagaagggaagcaggaaggaaggaaaaaggagagaatctctgccaccaccaccctgtgccagtcacagggcgcagtctaggagccgcctggagacccacgctgacctggctttccctcagagctgggagcatgggatgtgaggagcccctgggtcagcctgtgcccttctcctcccctcttcctgtcgttttctacgtctaattcagactaggtgtgtctgtggctcttcggagaggaaacaagacatttcacactgacacttctccccaccctcctcagatagcccatttccacgttgtttgggggcaggatgggtcctctgggtgggaagagggtgtggaggatggaaagagccggtaagaaggagaaagtcccgcctcggagggctcgggtggggcaggaggagaggctgcctccagtcacagagcccggaggcagaggcctcccaaggtgccatgctcttcaggagggtctgaggaggagggaggggcggcagagtgggcctgtgcttggagacgtcaccccgggctttataaaagggatgtgatcagggagctggggagaactcttgagaccgggagcccagctgcccaccctctggacattcacccagccaggtggtctcgtcacctcagaggctccgccagactcctgcccaggccaggactgaggcaaggtaggcacactgcagtgtccacccctgggaagggggtctgccctgacctggggatgctctggaggggagcagggaatccgttctaagacggacagatgcatccaggcaggcaaaggcaggggagggagacactgatctttcctgtttaccagcctggccagattatcctgggatgcctgggcgaatacactgagtcgcactttatttgtgaagctaacactctggggatcccgagggctctctcttgctgtggaaggaatacatgcaataaataaatgctgtggctggaattagagaccacagacacgcttggatggacctagggaaccgctcggggctcttgagagcaatggggctcctctgagcagctccccccaaattacagatggcaaatacaagcctaaccaagggcatctacctacccactaagaactaggggccacttcactccagaagctttccaaccatgcctggaatttctgtcactcactggatacaaaccccccagggtggagggaaccacaaaaattgtctacagcaggtcggccactcatggcccctttccaaataattcatttctaccatatatgttaagtgccccgatgggctgggcagtggaatctgtgtgtgtgtgtgtgtgtgtgtgtgtgtgtgtgtgtgatatgtgtgtatgggtgtatgtgtgtatatgtgtgtgatgtgtgtgcgcatgtgtggtgtatgtggtgtatgtgtgtgtatgatgtacgtgtatgggtgtatgtgtgtatatgtgtgtggcgtgtgtgtgcatctgtggtgtgtagtgtatgtgtacgggtgtatgggtatatatctgtgtggtgtgtgtgcatgtgtggtatgtgtggtgtatgtgtgtgtatgatgtgtatgtatggatgtgtgtatgtgtgtgtgtatgttgtgtgtatgggtgtatgtgtgtatatgtgtgtgtggtgtgtgtgcgtgtgtggtgtgtgtgcatgatgtgtgtgtataggtgtatgtgtgtatatgtgtgtggtgtgtatgcgtgtgtggtgtgtgtggcatatgtgtatgtgtgtgtatgggtgtatgtgtgtggtgtgtgtggtgtatgtgtgtgtgtatgatgtgtgtgtatgggtgtatgcgtgtatatgtgtatgggtgtgtgcgtatatatgtgtgtggtgtgtgtgtgcatgtgtggtgtgtgtggtgtatgtgtgtggtgtggggggtgtgtgtgtgtgtgctggggtcaggcagagttgtcccatggcgcacatggtaagtgccatccacagtgggaaggaggcactcggggggaaaggggagccggaagaaagagtaccaccctccaaccacacaagcccactgccctccttcctggcccaccaccctgcttccgcacagagaaccggaaatgtacatctacccacattcctgtctggctcagacccctccaggatgaagcccctgcagggccccttcccccagccttgtcactagctttctctccatgcaaagctccatcctcttgtctagctagagggcctgaagttccctttgcactcagcccctgcccttgcttcagcgccttagcaccgtcctgggaacactttctgtaaacctttcagcgattcatgctcagaaacagctcaagtgccaccccctgccaaaaatctgcctggtcctcctaggttggg

SEQ ID NO: 347 - DNA, 3001 bp, homo sapiens
ttgtaattttttgttaatagtaagtattagataagtgaggggtgttaatttgtagattgtcggtatgtttttttagtattaggggacgattaggttgagtttgtgttgggagagcgttttgtttgagggtagagatatagtttttgtttttagagatttttagtttgatagaagaaatagtttttgttttggagagttttttgtttaagggtatagagagttattgtaggtttaagaaagagataaaagttatttgcgatgtatgtagttagtaaatatttattgagggttttttttgtatgtgtttagtaatggagtgggtgttaagggtatagggggaagggggtttgtttttgtttttaaagtgttgtatttgagtagttataaaatagtatggtggtgggtgttacgagataagaaggtggggtttttaagtaggttgtttggatgtgttgttatttggaagttttttttttgtatttttggtattttttaggtgtatttattttttgtagtttttatttcgttttttttgtttatagttggttgtttatttaaggtttttgattagtttatagtttatttattttaaaattttgcgttgaggaagcgtttagtgatcgaggaaagaagggaagtaggaaggaaggaaaaaggagagaatttttgttattattattttgtgttagttatagggcgtagtttaggagtcgtttggagatttacgttgatttggtttttttttagagttgggagtatgggatgtgaggagtttttgggttagtttgtgtttttttttttttttttttttgtcgttttttacgtttaatttagattaggtgtgtttgtggtttttcggagaggaaataagatattttatattgatatttttttttattttttttagatagtttatttttacgttgtttgggggtaggatgggttttttgggtgggaagagggtgtggaggatggaaagagtcggtaagaaggagaaagtttcgtttcggagggttcgggtggggtaggaggagaggttgtttttagttatagagttcggaggtagaggttttttaaggtgttatgttttttaggagggtttgaggaggagggaggggcggtagagtgggtttgtgtttggagacgttatttcgggttttataaaagggatgtgattagggagttggggagaatttttgagatcgggagtttagttgtttattttttggatatttatttagttaggtggtttcgttattttagaggtttcgttagatttttgtttaggttaggattgaggtaaggtaggtatattgtagtgtttatttttgggaagggggtttgttttgatttggggatgttttggaggggagtagggaattcgttttaagacggatagatgtatttaggtaggtaaaggtaggggagggagatattgattttttttgtttattagtttggttagattattttgggatgtttgggcgaatatattgagtcgtattttatttgtgaagttaatattttggggatttcgagggtttttttttgttgtggaaggaatatatgtaataaataaatgttgtggttggaattagagattatagatacgtttggatggatttagggaatcgttcggggtttttgagagtaatggggtttttttgagtagttttttttaaattatagatggtaaatataagtttaattaagggtatttatttatttattaagaattaggggttattttattttagaagttttttaattatgtttggaatttttgttatttattggatataaattttttagggtggagggaattataaaaattgtttatagtaggtcggttatttatggtttttttttaaataatttatttttattatatatgttaagtgtttcgatgggttgggtagtggaatttgtgtgtgtgtgtgtgtgtgtgtgtgtgtgtgtgtgtgatatgtgtgtatgggtgtatgtgtgtatatgtgtgtgatgtgtgtgcgtatgtgtggtgtatgtggtgtatgtgtgtgtatgatgtacgtgtatgggtgtatgtgtgtatatgtgtgtggcgtgtgtgtgtatttgtggtgtgtagtgtatgtgtacgggtgtatgggtatatatttgtgtggtgtgtgtgtatgtgtggtatgtgtggtgtatgtgtgtgtatgatgtgtatgtatggatgtgtgtatgtgtgtgtgtatgttgtgtgtatgggtgtatgtgtgtatatgtgtgtgtggtgtgtgtgcgtgtgtggtgtgtgtgtatgatgtgtgtgtataggtgtatgtgtgtatatgtgtgtggtgtgtatgcgtgtgtggtgtgtgtggtatatgtgtatgtgtgtgtatgggtgtatgtgtgtggtgtgtgtggtgtatgtgtgtgtgtatgatgtgtgtgtatgggtgtatgcgtgtatatgtgtatgggtgtgtgcgtatatatgtgtgtggtgtgtgtgtgtatgtgtggtgtgtgtggtgtatgtgtgtggtgtggggggtgtgtgtgtgtgtgttggggttaggtagagttgttttatggcgtatatggtaagtgttatttatagtgggaaggaggtattcggggggaaaggggagtcggaagaaagagtattattttttaattatataagtttattgtttttttttttggtttattattttgttttcgtatagagaatcggaaatgtatatttatttatatttttgtttggtttagatttttttaggatgaagtttttgtagggtttttttttttagttttgttattagttttttttttatgtaaagttttatttttttgtttagttagagggtttgaagttttttttgtatttagtttttgtttttgttttagcgttttagtatcgttttgggaatattttttgtaaattttttagcgatttatgtttagaaatagtttaagtgttattttttgttaaaaatttgtttggtttttttaggttggg

SEQ ID NO: 348 - DNA, 3001 bp, homo sapiens
ttgtaattttttgttaatagtaagtattagataagtgaggggtgttaatttgtagattgttggtatgtttttttagtattaggggatgattaggttgagtttgtgttgggagagtgttttgtttgagggtagagatatagtttttgtttttagagatttttagtttgatagaagaaatagtttttgttttggagagttttttgtttaagggtatagagagttattgtaggtttaagaaagagataaaagttatttgtgatgtatgtagttagtaaatatttattgagggttttttttgtatgtgtttagtaatggagtgggtgttaagggtatagggggaagggggtttgtttttgtttttaaagtgttgtatttgagtagttataaaatagtatggtggtgggtgttatgagataagaaggtggggtttttaagtaggttgtttggatgtgttgttatttggaagttttttttttgtatttttggtattttttaggtgtatttattttttgtagtttttattttgttttttttgtttatagttggttgtttatttaaggtttttgattagtttatagtttatttattttaaaattttgtgttgaggaagtgtttagtgattgaggaaagaagggaagtaggaaggaaggaaaaaggagagaatttttgttattattattttgtgttagttatagggtgtagtttaggagttgtttggagatttatgttgatttggtttttttttagagttgggagtatgggatgtgaggagtttttgggttagtttgtgtttttttttttttttttttttgttgttttttatgtttaatttagattaggtgtgtttgtggttttttggagaggaaataagatattttatattgatatttttttttattttttttagatagtttatttttatgttgtttgggggtaggatgggttttttgggtgggaagagggtgtggaggatggaaagagttggtaagaaggagaaagttttgttttggagggtttgggtggggtaggaggagaggttgtttttagttatagagtttggaggtagaggttttttaaggtgttatgttttttaggagggtttgaggaggagggaggggtggtagagtgggtttgtgtttggagatgttattttgggttttataaaagggatgtgattagggagttggggagaatttttgagattgggagtttagttgtttattttttggatatttatttagttaggtggttttgttattttagaggttttgttagatttttgtttaggttaggattgaggtaaggtaggtatattgtagtgtttatttttgggaagggggtttgttttgatttggggatgttttggaggggagtagggaatttgttttaagatggatagatgtatttaggtaggtaaaggtaggggagggagatattgattttttttgtttattagtttggttagattattttgggatgtttgggtgaatatattgagttgtattttatttgtgaagttaatattttggggattttgagggtttttttttgttgtggaaggaatatatgtaataaataaatgttgtggttggaattagagattatagatatgtttggatggatttagggaattgtttggggtttttgagagtaatggggtttttttgagtagttttttttaaattatagatggtaaatataagtttaattaagggtatttatttatttattaagaattaggggttattttattttagaagttttttaattatgtttggaatttttgttatttattggatataaattttttagggtggagggaattataaaaattgtttatagtaggttggttatttatggtttttttttaaataatttatttttattatatatgttaagtgttttgatgggttgggtagtggaatttgtgtgtgtgtgtgtgtgtgtgtgtgtgtgtgtgtgtgatatgtgtgtatgggtgtatgtgtgtatatgtgtgtgatgtgtgtgtgtatgtgtggtgtatgtggtgtatgtgtgtgtatgatgtatgtgtatgggtgtatgtgtgtatatgtgtgtggtgtgtgtgtgtatttgtggtgtgtagtgtatgtgtatgggtgtatgggtatatatttgtgtggtgtgtgtgtatgtgtggtatgtgtggtgtatgtgtgtgtatgatgtgtatgtatggatgtgtgtatgtgtgtgtgtatgttgtgtgtatgggtgtatgtgtgtatatgtgtgtgtggtgtgtgtgtgtgtgtggtgtgtgtgtatgatgtgtgtgtataggtgtatgtgtgtatatgtgtgtggtgtgtatgtgtgtgtggtgtgtgtggtatatgtgtatgtgtgtgtatgggtgtatgtgtgtggtgtgtgtggtgtatgtgtgtgtgtatgatgtgtgtgtatgggtgtatgtgtgtatatgtgtatgggtgtgtgtgtatatatgtgtgtggtgtgtgtgtgtatgtgtggtgtgtgtggtgtatgtgtgtggtgtggggggtgtgtgtgtgtgtgttggggttaggtagagttgttttatggtgtatatggtaagtgttatttatagtgggaaggaggtatttggggggaaaggggagttggaagaaagagtattattttttaattatataagtttattgtttttttttttggtttattattttgtttttgtatagagaattggaaatgtatatttatttatatttttgtttggtttagatttttttaggatgaagtttttgtagggtttttttttttagttttgttattagttttttttttatgtaaagttttatttttttgtttagttagagggtttgaagttttttttgtatttagtttttgtttttgttttagtgttttagtattgttttgggaatattttttgtaaattttttagtgatttatgtttagaaatagtttaagtgttattttttgttaaaaatttgtttggtttttttaggttggg

SEQ ID NO: 349 - DNA, 3001 bp, homo sapiens
tttaatttaggaggattaggtagatttttggtagggggtggtatttgagttgtttttgagtatgaatcgttgaaaggtttatagaaagtgtttttaggacggtgttaaggcgttgaagtaagggtaggggttgagtgtaaagggaattttaggttttttagttagataagaggatggagttttgtatggagagaaagttagtgataaggttgggggaaggggttttgtaggggttttattttggaggggtttgagttagataggaatgtgggtagatgtatattttcggttttttgtgcggaagtagggtggtgggttaggaaggagggtagtgggtttgtgtggttggagggtggtattttttttttcggttttttttttttttcgagtgttttttttttattgtggatggtatttattatgtgcgttatgggataattttgtttgattttagtatatatatatatattttttatattatatatatatattatatatattatatatgtatatatatattatatatatatatacgtatatatttatatatatatatacgtatatatttatatatatatattatatatatatatatatattatatatattatatatatatatttatatatatatatatatatatgttatatatattatatacgtatatatattatatatatatatatatatatatttatatatatatattatgtatatatattatatacgtatatatattatatatatatatatatatatatatttatatatataatatatatatatatatatatatatttatatatatatattatatatatatatatattatatatattatatatgtatatatattatatagatatatatttatatattcgtatatatatattatatattatagatgtatatatacgttatatatatatatatatatatatttatatacgtatattatatatatatatatattatatatattatatatgcgtatatatattatatatatatatatatatatatttatatatatatattatatatatatatatatatatatatatatatatatatagattttattgtttagtttatcggggtatttaatatatatggtagaaatgaattatttggaaaggggttatgagtggtcgatttgttgtagataatttttgtggttttttttattttggggggtttgtatttagtgagtgatagaaattttaggtatggttggaaagtttttggagtgaagtggtttttagtttttagtgggtaggtagatgtttttggttaggtttgtatttgttatttgtaatttggggggagttgtttagaggagttttattgtttttaagagtttcgagcggttttttaggtttatttaagcgtgtttgtggtttttaattttagttatagtatttatttattgtatgtattttttttatagtaagagagagttttcgggatttttagagtgttagttttataaataaagtgcgatttagtgtattcgtttaggtattttaggataatttggttaggttggtaaataggaaagattagtgttttttttttttgtttttgtttgtttggatgtatttgttcgttttagaacggattttttgtttttttttagagtatttttaggttagggtagattttttttttaggggtggatattgtagtgtgtttattttgttttagttttggtttgggtaggagtttggcggagtttttgaggtgacgagattatttggttgggtgaatgtttagagggtgggtagttgggttttcggttttaagagttttttttagttttttgattatattttttttataaagttcggggtgacgtttttaagtataggtttattttgtcgttttttttttttttttagatttttttgaagagtatggtattttgggaggtttttgttttcgggttttgtgattggaggtagtttttttttttgttttattcgagtttttcgaggcgggatttttttttttttatcggttttttttattttttatattttttttttatttagaggatttattttgtttttaaataacgtggaaatgggttatttgaggagggtggggagaagtgttagtgtgaaatgttttgtttttttttcgaagagttatagatatatttagtttgaattagacgtagaaaacgataggaagaggggaggagaagggtataggttgatttaggggttttttatattttatgtttttagttttgagggaaagttaggttagcgtgggtttttaggcggtttttagattgcgttttgtgattggtatagggtggtggtggtagagattttttttttttttttttttttttgtttttttttttttttcggttattgagcgtttttttagcgtagggttttgaggtgaataggttatggattggttagagattttaggtaagtaattagttatgagtaaggaggacgaaatgggagttgtagaaggtggatgtatttgggaagtgttaggggtgtagagaggggatttttaggtggtagtatatttagatagtttgtttgggggttttatttttttgtttcgtggtatttattattatattattttgtgattgtttaggtatagtattttgaggatagggataggtttttttttttttgtatttttggtatttattttattgttgggtatatatagagagggtttttaatagatatttgttaattgtatgtatcgtaagtgatttttgttttttttttgagtttgtaataattttttatatttttggataaggggttttttagggtagagattgttttttttattaggttgggagtttttgaaggtaggggttatgtttttatttttagataggacgtttttttagtataagtttaatttggtcgttttttaatgttggagaagtatgtcggtagtttgtaggttagtattttttatttgtttgatgtttattgttaataggggattgtaa

SEQ ID NO: 350 - DNA, 3001 bp, homo sapiens
tttaatttaggaggattaggtagatttttggtagggggtggtatttgagttgtttttgagtatgaattgttgaaaggtttatagaaagtgtttttaggatggtgttaaggtgttgaagtaagggtaggggttgagtgtaaagggaattttaggttttttagttagataagaggatggagttttgtatggagagaaagttagtgataaggttgggggaaggggttttgtaggggttttattttggaggggtttgagttagataggaatgtgggtagatgtatatttttggttttttgtgtggaagtagggtggtgggttaggaaggagggtagtgggtttgtgtggttggagggtggtatttttttttttggtttttttttttttttgagtgttttttttttattgtggatggtatttattatgtgtgttatgggataattttgtttgattttagtatatatatatatattttttatattatatatatatattatatatattatatatgtatatatatattatatatatatatatgtatatatttatatatatatatatgtatatatttatatatatatattatatatatatatatatattatatatattatatatatatatttatatatatatatatatatatgttatatatattatatatgtatatatattatatatatatatatatatatatttatatatatatattatgtatatatattatatatgtatatatattatatatatatatatatatatatatttatatatataatatatatatatatatatatatatttatatatatatattatatatatatatatattatatatattatatatgtatatatattatatagatatatatttatatatttgtatatatatattatatattatagatgtatatatatgttatatatatatatatatatatatttatatatgtatattatatatatatatatattatatatattatatatgtgtatatatattatatatatatatatatatatatttatatatatatattatatatatatatatatatatatatatatatatatatagattttattgtttagtttattggggtatttaatatatatggtagaaatgaattatttggaaaggggttatgagtggttgatttgttgtagataatttttgtggttttttttattttggggggtttgtatttagtgagtgatagaaattttaggtatggttggaaagtttttggagtgaagtggtttttagtttttagtgggtaggtagatgtttttggttaggtttgtatttgttatttgtaatttggggggagttgtttagaggagttttattgtttttaagagttttgagtggttttttaggtttatttaagtgtgtttgtggtttttaattttagttatagtatttatttattgtatgtattttttttatagtaagagagagtttttgggatttttagagtgttagttttataaataaagtgtgatttagtgtatttgtttaggtattttaggataatttggttaggttggtaaataggaaagattagtgttttttttttttgtttttgtttgtttggatgtatttgtttgttttagaatggattttttgtttttttttagagtatttttaggttagggtagattttttttttaggggtggatattgtagtgtgtttattttgttttagttttggtttgggtaggagtttggtggagtttttgaggtgatgagattatttggttgggtgaatgtttagagggtgggtagttgggtttttggttttaagagttttttttagttttttgattatattttttttataaagtttggggtgatgtttttaagtataggtttattttgttgttttttttttttttttagatttttttgaagagtatggtattttgggaggtttttgtttttgggttttgtgattggaggtagtttttttttttgttttatttgagttttttgaggtgggatttttttttttttattggttttttttattttttatattttttttttatttagaggatttattttgtttttaaataatgtggaaatgggttatttgaggagggtggggagaagtgttagtgtgaaatgttttgttttttttttgaagagttatagatatatttagtttgaattagatgtagaaaatgataggaagaggggaggagaagggtataggttgatttaggggttttttatattttatgtttttagttttgagggaaagttaggttagtgtgggtttttaggtggtttttagattgtgttttgtgattggtatagggtggtggtggtagagattttttttttttttttttttttttgttttttttttttttttggttattgagtgtttttttagtgtagggttttgaggtgaataggttatggattggttagagattttaggtaagtaattagttatgagtaaggaggatgaaatgggagttgtagaaggtggatgtatttgggaagtgttaggggtgtagagaggggatttttaggtggtagtatatttagatagtttgtttgggggttttatttttttgttttgtggtatttattattatattattttgtgattgtttaggtatagtattttgaggatagggataggtttttttttttttgtatttttggtatttattttattgttgggtatatatagagagggtttttaatagatatttgttaattgtatgtattgtaagtgatttttgttttttttttgagtttgtaataattttttatatttttggataaggggttttttagggtagagattgttttttttattaggttgggagtttttgaaggtaggggttatgtttttatttttagataggatgtttttttagtataagtttaatttggttgttttttaatgttggagaagtatgttggtagtttgtaggttagtattttttatttgtttgatgtttattgttaataggggattgtaa

SEQ ID NO: 351 - DNA, 1160 bp, homo sapiens
ctgaccttaatgacaccagaggcctcttgaaatcagctaaccatccattgaggatggaaggggaacagcctcatcagagctgcttgcaaaaatgagccgcagaccacacgtcagtgagttacgcaacatttcttttattgcctcgggttggaagctccagcgccccctcccttagccctacgtccccgccccccgcccccgccccgcatgctctgactcctttggggtctgaagttcactgccccgcacctgcgccctcagccccgcccagcgcttctgccgtggttccctggtgccgcctcccgcttgccgaagcgcaggccgaaggagttccagttgtagttcggcaggtccttctcccgctgcaccagcaccgcgccctggggtgcggggatctggcggctgtggggggcggacaggcccggctgctgggggctcccggagctctcggggggcggggacagcgaggtcccccgacggctcagcctggcagtagcagctggcttcctctcggtgcacggcaggctctgctccccgggggccaggaggcccagggattctagctgctggcctaggacagagggcacagaaagatgaggccggggtccgggaaagatggctttgcaacacctcctgtcatcccatcctatccttcttttccttccttgaccttttggaagctcggagctcagtgccatgcgaaccagcacgatcaccttagctgggatgattaggccctaggcgcctccctcttccaacatagctttgatttagaatgtttgccagaattatcttaaataactctcatattacgttacttccttttaggaaacaaacagggtagggcatggaaataaagaaaaccaaagtatttgctgaacacccagctctgggccccttcctggctgtgagcagcctgggcagtggggccatgttaattcatctctgtatctctcatagtgcttgaaacagtggcttgctcatagtggggcctcaataaatgcctgttaaatacataaaagctaaaaacgtgtagtaacagaaatcgagaaagtggagctaagacattgtggccccacacacctgtgttccaacactcgtctttgataagaattgtgaccacccacccccccaaccccgcccaataagctacataagga

SEQ ID NO: 352 - DNA, 1160 bp, homo sapiens
ttgattttaatgatattagaggttttttgaaattagttaattatttattgaggatggaaggggaatagttttattagagttgtttgtaaaaatgagtcgtagattatacgttagtgagttacgtaatattttttttattgtttcgggttggaagttttagcgtttttttttttagttttacgttttcgtttttcgttttcgtttcgtatgttttgatttttttggggtttgaagtttattgtttcgtatttgcgtttttagtttcgtttagcgtttttgtcgtggttttttggtgtcgtttttcgtttgtcgaagcgtaggtcgaaggagttttagttgtagttcggtaggtttttttttcgttgtattagtatcgcgttttggggtgcggggatttggcggttgtggggggcggataggttcggttgttgggggttttcggagttttcggggggcggggatagcgaggtttttcgacggtttagtttggtagtagtagttggttttttttcggtgtacggtaggttttgtttttcgggggttaggaggtttagggattttagttgttggtttaggatagagggtatagaaagatgaggtcggggttcgggaaagatggttttgtaatattttttgttattttattttattttttttttttttttttgattttttggaagttcggagtttagtgttatgcgaattagtacgattattttagttgggatgattaggttttaggcgttttttttttttaatatagttttgatttagaatgtttgttagaattattttaaataatttttatattacgttatttttttttaggaaataaatagggtagggtatggaaataaagaaaattaaagtatttgttgaatatttagttttgggtttttttttggttgtgagtagtttgggtagtggggttatgttaatttatttttgtattttttatagtgtttgaaatagtggtttgtttatagtggggttttaataaatgtttgttaaatatataaaagttaaaaacgtgtagtaatagaaatcgagaaagtggagttaagatattgtggttttatatatttgtgttttaatattcgtttttgataagaattgtgattatttatttttttaatttcgtttaataagttatataagga

SEQ ID NO: 353 - DNA, 1160 bp, homo sapiens
ttgattttaatgatattagaggttttttgaaattagttaattatttattgaggatggaaggggaatagttttattagagttgtttgtaaaaatgagttgtagattatatgttagtgagttatgtaatattttttttattgttttgggttggaagttttagtgtttttttttttagttttatgtttttgttttttgtttttgttttgtatgttttgatttttttggggtttgaagtttattgttttgtatttgtgtttttagttttgtttagtgtttttgttgtggttttttggtgttgttttttgtttgttgaagtgtaggttgaaggagttttagttgtagtttggtaggttttttttttgttgtattagtattgtgttttggggtgtggggatttggtggttgtggggggtggataggtttggttgttgggggtttttggagtttttggggggtggggatagtgaggttttttgatggtttagtttggtagtagtagttggtttttttttggtgtatggtaggttttgttttttgggggttaggaggtttagggattttagttgttggtttaggatagagggtatagaaagatgaggttggggtttgggaaagatggttttgtaatattttttgttattttattttattttttttttttttttttgattttttggaagtttggagtttagtgttatgtgaattagtatgattattttagttgggatgattaggttttaggtgttttttttttttaatatagttttgatttagaatgtttgttagaattattttaaataatttttatattatgttatttttttttaggaaataaatagggtagggtatggaaataaagaaaattaaagtatttgttgaatatttagttttgggtttttttttggttgtgagtagtttgggtagtggggttatgttaatttatttttgtattttttatagtgtttgaaatagtggtttgtttatagtggggttttaataaatgtttgttaaatatataaaagttaaaaatgtgtagtaatagaaattgagaaagtggagttaagatattgtggttttatatatttgtgttttaatatttgtttttgataagaattgtgattatttatttttttaattttgtttaataagttatataagga

SEQ ID NO: 354 - DNA, 1160 bp, homo sapiens
tttttatgtagtttattgggcggggttgggggggtgggtggttataatttttattaaagacgagtgttggaatataggtgtgtggggttataatgttttagttttattttttcgatttttgttattatacgtttttagtttttatgtatttaataggtatttattgaggttttattatgagtaagttattgttttaagtattatgagagatatagagatgaattaatatggttttattgtttaggttgtttatagttaggaaggggtttagagttgggtgtttagtaaatattttggttttttttatttttatgttttattttgtttgttttttaaaaggaagtaacgtaatatgagagttatttaagataattttggtaaatattttaaattaaagttatgttggaagagggaggcgtttagggtttaattattttagttaaggtgatcgtgttggttcgtatggtattgagtttcgagtttttaaaaggttaaggaaggaaaagaaggataggatgggatgataggaggtgttgtaaagttatttttttcggatttcggttttatttttttgtgttttttgttttaggttagtagttagaatttttgggttttttggttttcggggagtagagtttgtcgtgtatcgagaggaagttagttgttattgttaggttgagtcgtcgggggatttcgttgttttcgtttttcgagagtttcgggagtttttagtagtcgggtttgttcgttttttatagtcgttagattttcgtattttagggcgcggtgttggtgtagcgggagaaggatttgtcgaattataattggaattttttcggtttgcgtttcggtaagcgggaggcggtattagggaattacggtagaagcgttgggcggggttgagggcgtaggtgcggggtagtgaattttagattttaaaggagttagagtatgcggggcgggggcggggggcggggacgtagggttaagggagggggcgttggagtttttaattcgaggtaataaaagaaatgttgcgtaatttattgacgtgtggtttgcggtttatttttgtaagtagttttgatgaggttgttttttttttatttttaatggatggttagttgattttaagaggtttttggtgttattaaggttag

SEQ ID NO: 355 - DNA, 1160 bp, homo sapiens
tttttatgtagtttattgggtggggttgggggggtgggtggttataatttttattaaagatgagtgttggaatataggtgtgtggggttataatgttttagttttatttttttgatttttgttattatatgtttttagtttttatgtatttaataggtatttattgaggttttattatgagtaagttattgttttaagtattatgagagatatagagatgaattaatatggttttattgtttaggttgtttatagttaggaaggggtttagagttgggtgtttagtaaatattttggttttttttatttttatgttttattttgtttgttttttaaaaggaagtaatgtaatatgagagttatttaagataattttggtaaatattttaaattaaagttatgttggaagagggaggtgtttagggtttaattattttagttaaggtgattgtgttggtttgtatggtattgagttttgagtttttaaaaggttaaggaaggaaaagaaggataggatgggatgataggaggtgttgtaaagttattttttttggattttggttttatttttttgtgttttttgttttaggttagtagttagaatttttgggttttttggtttttggggagtagagtttgttgtgtattgagaggaagttagttgttattgttaggttgagttgttgggggattttgttgtttttgttttttgagagttttgggagtttttagtagttgggtttgtttgttttttatagttgttagatttttgtattttagggtgtggtgttggtgtagtgggagaaggatttgttgaattataattggaatttttttggtttgtgttttggtaagtgggaggtggtattagggaattatggtagaagtgttgggtggggttgagggtgtaggtgtggggtagtgaattttagattttaaaggagttagagtatgtggggtgggggtggggggtggggatgtagggttaagggagggggtgttggagtttttaatttgaggtaataaaagaaatgttgtgtaatttattgatgtgtggtttgtggtttatttttgtaagtagttttgatgaggttgttttttttttatttttaatggatggttagttgattttaagaggtttttggtgttattaaggttag

SEQ ID NO: 356 - DNA, 50 bp, homo sapiens
gttgagcaggtccgtgaattgtcagcgcgctgtgggcgactgtgtggccg

SEQ ID NO: 357 - DNA, 50 bp, homo sapiens
gttgagtaggttcgtgaattgttagcgcgttgtgggcgattgtgtggtcg

SEQ ID NO: 358 - DNA, 50 bp, homo sapiens
gttgagtaggtttgtgaattgttagtgtgttgtgggtgattgtgtggttg

SEQ ID NO: 359 - DNA, 50 bp, homo sapiens
cggttatatagtcgtttatagcgcgttgataatttacggatttgtttaat

SEQ ID NO: 360 - DNA, 50 bp, homo sapiens
tggttatatagttgtttatagtgtgttgataatttatggatttgtttaat

SEQ ID NO: 361 - DNA, 3001 bp, homo sapiens
attgcccatactgagagactaaaacccttaggacttctgggacctgaatgaggcaatggtctgaagtgggcttgcgctggaagcaagacgtaagtggtgaaggtgagtatcagggcagcaggttgacccctttcttgttatgagcatgcattccttcattcttactaatacgggttaggtgcctacccatggcaagagcagttctaggcagggagaggcccctacccacccacagctgacggtctagggcttgtttacattctaggtttcagcgggaaagcaagaacacccaactccctgcttttgattctatgttagtagctcagcgcgcctgtgcgagcacgtgctgcagccagggtaggggctcagaaactggttgacaagatgagcagtggggtcctagggggttgggcgggaagggcccacaaggccatattccaggctgttcggctgcgagtgacccctgagaggtcgggatctccgagctcgtccgatgtctccatcccagccaggagcttgcgaaggggaaggagggcggaagcagagtgggacagatgtggttcgttctggggcttcctgtccacgaagatggataattctagcgacccgcctgggattttggaatcctggcggacccaaaagacagcagaagtcaccgcagaggatgccaccccgcacggcagcccgcccagagcgacggtctcacaggttccggcgccgtcgagcgcccaagcctcctgttggccgccagctgtgtccgcgacgcgctgggtcgggaggaggagacccgaggcgccggtaagtcccccgctgcaggtggcccggagggcaggggtgaggacggggacgtgtactgaactttgggaggtttgcggggctggagttttgtttcagagatagccagatcgagatcagaacgttttccagagagcccaggtttccacttgtggctgggcgacccggtccggaattcatcctttctcggccctcagcttcctccgggcggggttccgatggggcagctaagttccgcgcctcctgccggtgccagatactggcgtgtcgacccgcgctgcggttggcttcttgctccacagcgctatgcgcgcggcggctccgagggctcctggtctctctcagccaacggccttctggggccgccgcctccctctagagctgctcgggtcccattgcagagagtcccgcagcgcccgccggcagccacggcacttcgcaataaccaacttccccgccgccggcgcgtcccgccagcctgccctcggccgcaggcgactggacggcggttacggggcggtcccagcgccaccacgactggctgtcggctccgccagtcatgggctgatgacgccccggggctggctccgcccctagcggcagccccgcctcccctccagagcctggtcggcttagccctgctttccgcctcactcgttgagcaggtccgtgaattgtcagcgcgctgtgggcgactgtgtggccgcggcggccgccaggcttgccgcactccccctgaggtgcccgccggaaccaatgtgccctggtccactgggccgtgagcagccaccgactgggggcaacttggcacttagaaccgcagcagggacgtcggtttgctatcgggactcggcgaggacggtgagtggccgcgcgccgggctagcggctcctctcggcgcggttcggcggcggcgagaggggacgggacgcgtcctggcgctcggcggtccgttcgtccgagcgtgaccgctgtggggaggtcagggctgggcgggatttactccgtgccaatatccccactcccgaacttcttcttgtcaaagcatcccaactccgcccgggacgcggttccagtccgcaccaacttggcgtaattgacatgggtaggtggggccgggacgcgtcccctgcccctctgcggcaacgacatggagcgctggggcggcctccgcgcccgcggcgtgcggaccgcggttcctgaaaaattacccgcgctgtgcggtacggtaagacccggcgtccgcgtctggatctcaaggctgagcgagcgctcatcgggctcaaggtgggtctcagcgccagagaactggagtaccagccgggttctgtagcgggggcttcagtgctctgcagctactgagaggaattgagagcactgctgggctttgaactttctaaagtaattgctttctattagcacttgaatccatgaccctcctgaggtgctcggacctccacatccacccgcaaggggtgtccgaaggacttcgttaggaccaggcgggagctgctgtcggttctggtgcccagtgccttggagaatcctagaggctgcgaaagggattgccagcctggtcggttggtgtttgtttgagcacctgcgtgtttaagtgatgaagttgagtcaggaattgacagcagagaactcaaggttaaacctgacactccgtttgtgactcggtctgggttagattgttttccccccttaatggtaagggggtaaaagcagcttgtttttctgagaccaactacatgcatgtagtttatattatgtgcggaataaacagaattcaatacgatattttcttacaattcttatttgacatgaataagagcttttgaaaatactagacagaaacaggtccagaatttggggatgtttagacctttgaaaatacatgaaaatgttgagatatatagttctgtatgtgtatatgaagatgtagatgcgcatatacacacatacatacgtgtatatgtgtgagtgtgtgtatatataaaattaaaaggtgaatgaggtaaatatatgaaggggaaattcagccttgaacttcccttgggtcacagagatggatcctctgagctgtggggtgttagtgagtgtgtatgcgtaagcatgtctgcatctgcctggtctgtctgggtcagagtatgtccatgaactttacgagcgttcagttcaataccactcagtgcagaatccg

SEQ ID NO: 362 - DNA, 3001 bp, homo sapiens
attgtttatattgagagattaaaatttttaggatttttgggatttgaatgaggtaatggtttgaagtgggtttgcgttggaagtaagacgtaagtggtgaaggtgagtattagggtagtaggttgattttttttttgttatgagtatgtatttttttatttttattaatacgggttaggtgtttatttatggtaagagtagttttaggtagggagaggtttttatttatttatagttgacggtttagggtttgtttatattttaggttttagcgggaaagtaagaatatttaattttttgtttttgattttatgttagtagtttagcgcgtttgtgcgagtacgtgttgtagttagggtaggggtttagaaattggttgataagatgagtagtggggttttagggggttgggcgggaagggtttataaggttatattttaggttgttcggttgcgagtgatttttgagaggtcgggattttcgagttcgttcgatgtttttattttagttaggagtttgcgaaggggaaggagggcggaagtagagtgggatagatgtggttcgttttggggttttttgtttacgaagatggataattttagcgattcgtttgggattttggaattttggcggatttaaaagatagtagaagttatcgtagaggatgttatttcgtacggtagttcgtttagagcgacggttttataggtttcggcgtcgtcgagcgtttaagttttttgttggtcgttagttgtgttcgcgacgcgttgggtcgggaggaggagattcgaggcgtcggtaagtttttcgttgtaggtggttcggagggtaggggtgaggacggggacgtgtattgaattttgggaggtttgcggggttggagttttgttttagagatagttagatcgagattagaacgttttttagagagtttaggtttttatttgtggttgggcgattcggttcggaatttattttttttcggtttttagtttttttcgggcggggtttcgatggggtagttaagtttcgcgttttttgtcggtgttagatattggcgtgtcgattcgcgttgcggttggttttttgttttatagcgttatgcgcgcggcggtttcgagggtttttggttttttttagttaacggttttttggggtcgtcgtttttttttagagttgttcgggttttattgtagagagtttcgtagcgttcgtcggtagttacggtatttcgtaataattaattttttcgtcgtcggcgcgtttcgttagtttgttttcggtcgtaggcgattggacggcggttacggggcggttttagcgttattacgattggttgtcggtttcgttagttatgggttgatgacgtttcggggttggtttcgtttttagcggtagtttcgttttttttttagagtttggtcggtttagttttgtttttcgttttattcgttgagtaggttcgtgaattgttagcgcgttgtgggcgattgtgtggtcgcggcggtcgttaggtttgtcgtattttttttgaggtgttcgtcggaattaatgtgttttggtttattgggtcgtgagtagttatcgattgggggtaatttggtatttagaatcgtagtagggacgtcggtttgttatcgggattcggcgaggacggtgagtggtcgcgcgtcgggttagcggtttttttcggcgcggttcggcggcggcgagaggggacgggacgcgttttggcgttcggcggttcgttcgttcgagcgtgatcgttgtggggaggttagggttgggcgggatttatttcgtgttaatatttttattttcgaatttttttttgttaaagtattttaatttcgttcgggacgcggttttagttcgtattaatttggcgtaattgatatgggtaggtggggtcgggacgcgttttttgtttttttgcggtaacgatatggagcgttggggcggttttcgcgttcgcggcgtgcggatcgcggtttttgaaaaattattcgcgttgtgcggtacggtaagattcggcgttcgcgtttggattttaaggttgagcgagcgtttatcgggtttaaggtgggttttagcgttagagaattggagtattagtcgggttttgtagcgggggttttagtgttttgtagttattgagaggaattgagagtattgttgggttttgaattttttaaagtaattgttttttattagtatttgaatttatgatttttttgaggtgttcggatttttatatttattcgtaaggggtgttcgaaggatttcgttaggattaggcgggagttgttgtcggttttggtgtttagtgttttggagaattttagaggttgcgaaagggattgttagtttggtcggttggtgtttgtttgagtatttgcgtgtttaagtgatgaagttgagttaggaattgatagtagagaatttaaggttaaatttgatatttcgtttgtgattcggtttgggttagattgttttttttttttaatggtaagggggtaaaagtagtttgtttttttgagattaattatatgtatgtagtttatattatgtgcggaataaatagaatttaatacgatatttttttataatttttatttgatatgaataagagtttttgaaaatattagatagaaataggtttagaatttggggatgtttagatttttgaaaatatatgaaaatgttgagatatatagttttgtatgtgtatatgaagatgtagatgcgtatatatatatatatatacgtgtatatgtgtgagtgtgtgtatatataaaattaaaaggtgaatgaggtaaatatatgaaggggaaatttagttttgaattttttttgggttatagagatggattttttgagttgtggggtgttagtgagtgtgtatgcgtaagtatgtttgtatttgtttggtttgtttgggttagagtatgtttatgaattttacgagcgtttagtttaatattatttagtgtagaattcg

SEQ ID NO: 363 - DNA, 3001 bp, homo sapiens
attgtttatattgagagattaaaatttttaggatttttgggatttgaatgaggtaatggtttgaagtgggtttgtgttggaagtaagatgtaagtggtgaaggtgagtattagggtagtaggttgattttttttttgttatgagtatgtatttttttatttttattaatatgggttaggtgtttatttatggtaagagtagttttaggtagggagaggtttttatttatttatagttgatggtttagggtttgtttatattttaggttttagtgggaaagtaagaatatttaattttttgtttttgattttatgttagtagtttagtgtgtttgtgtgagtatgtgttgtagttagggtaggggtttagaaattggttgataagatgagtagtggggttttagggggttgggtgggaagggtttataaggttatattttaggttgtttggttgtgagtgatttttgagaggttgggatttttgagtttgtttgatgtttttattttagttaggagtttgtgaaggggaaggagggtggaagtagagtgggatagatgtggtttgttttggggttttttgtttatgaagatggataattttagtgatttgtttgggattttggaattttggtggatttaaaagatagtagaagttattgtagaggatgttattttgtatggtagtttgtttagagtgatggttttataggttttggtgttgttgagtgtttaagttttttgttggttgttagttgtgtttgtgatgtgttgggttgggaggaggagatttgaggtgttggtaagttttttgttgtaggtggtttggagggtaggggtgaggatggggatgtgtattgaattttgggaggtttgtggggttggagttttgttttagagatagttagattgagattagaatgttttttagagagtttaggtttttatttgtggttgggtgatttggtttggaatttatttttttttggtttttagttttttttgggtggggttttgatggggtagttaagttttgtgttttttgttggtgttagatattggtgtgttgatttgtgttgtggttggttttttgttttatagtgttatgtgtgtggtggttttgagggtttttggttttttttagttaatggttttttggggttgttgtttttttttagagttgtttgggttttattgtagagagttttgtagtgtttgttggtagttatggtattttgtaataattaatttttttgttgttggtgtgttttgttagtttgtttttggttgtaggtgattggatggtggttatggggtggttttagtgttattatgattggttgttggttttgttagttatgggttgatgatgttttggggttggttttgtttttagtggtagttttgttttttttttagagtttggttggtttagttttgttttttgttttatttgttgagtaggtttgtgaattgttagtgtgttgtgggtgattgtgtggttgtggtggttgttaggtttgttgtattttttttgaggtgtttgttggaattaatgtgttttggtttattgggttgtgagtagttattgattgggggtaatttggtatttagaattgtagtagggatgttggtttgttattgggatttggtgaggatggtgagtggttgtgtgttgggttagtggttttttttggtgtggtttggtggtggtgagaggggatgggatgtgttttggtgtttggtggtttgtttgtttgagtgtgattgttgtggggaggttagggttgggtgggatttattttgtgttaatatttttatttttgaatttttttttgttaaagtattttaattttgtttgggatgtggttttagtttgtattaatttggtgtaattgatatgggtaggtggggttgggatgtgttttttgtttttttgtggtaatgatatggagtgttggggtggtttttgtgtttgtggtgtgtggattgtggtttttgaaaaattatttgtgttgtgtggtatggtaagatttggtgtttgtgtttggattttaaggttgagtgagtgtttattgggtttaaggtgggttttagtgttagagaattggagtattagttgggttttgtagtgggggttttagtgttttgtagttattgagaggaattgagagtattgttgggttttgaattttttaaagtaattgttttttattagtatttgaatttatgatttttttgaggtgtttggatttttatatttatttgtaaggggtgtttgaaggattttgttaggattaggtgggagttgttgttggttttggtgtttagtgttttggagaattttagaggttgtgaaagggattgttagtttggttggttggtgtttgtttgagtatttgtgtgtttaagtgatgaagttgagttaggaattgatagtagagaatttaaggttaaatttgatattttgtttgtgatttggtttgggttagattgttttttttttttaatggtaagggggtaaaagtagtttgtttttttgagattaattatatgtatgtagtttatattatgtgtggaataaatagaatttaatatgatatttttttataatttttatttgatatgaataagagtttttgaaaatattagatagaaataggtttagaatttggggatgtttagatttttgaaaatatatgaaaatgttgagatatatagttttgtatgtgtatatgaagatgtagatgtgtatatatatatatatatatgtgtatatgtgtgagtgtgtgtatatataaaattaaaaggtgaatgaggtaaatatatgaaggggaaatttagttttgaattttttttgggttatagagatggattttttgagttgtggggtgttagtgagtgtgtatgtgtaagtatgtttgtatttgtttggtttgtttgggttagagtatgtttatgaattttatgagtgtttagtttaatattatttagtgtagaatttg

SEQ ID NO: 364 - DNA, 3001 bp, homo sapiens
cggattttgtattgagtggtattgaattgaacgttcgtaaagtttatggatatattttgatttagatagattaggtagatgtagatatgtttacgtatatatatttattaatattttatagtttagaggatttatttttgtgatttaagggaagtttaaggttgaattttttttttatatatttattttatttattttttaattttatatatatatatatttatatatatatacgtatgtatgtgtgtatatgcgtatttatatttttatatatatatatagaattatatattttaatatttttatgtatttttaaaggtttaaatatttttaaattttggatttgtttttgtttagtatttttaaaagtttttatttatgttaaataagaattgtaagaaaatatcgtattgaattttgtttatttcgtatataatataaattatatgtatgtagttggttttagaaaaataagttgtttttatttttttattattaaggggggaaaataatttaatttagatcgagttataaacggagtgttaggtttaattttgagttttttgttgttaatttttgatttaattttattatttaaatacgtaggtgtttaaataaatattaatcgattaggttggtaatttttttcgtagtttttaggattttttaaggtattgggtattagaatcgatagtagttttcgtttggttttaacgaagtttttcggatattttttgcgggtggatgtggaggttcgagtattttaggagggttatggatttaagtgttaatagaaagtaattattttagaaagtttaaagtttagtagtgtttttaattttttttagtagttgtagagtattgaagttttcgttatagaattcggttggtattttagttttttggcgttgagatttattttgagttcgatgagcgttcgtttagttttgagatttagacgcggacgtcgggttttatcgtatcgtatagcgcgggtaattttttaggaatcgcggttcgtacgtcgcgggcgcggaggtcgttttagcgttttatgtcgttgtcgtagaggggtaggggacgcgtttcggttttatttatttatgttaattacgttaagttggtgcggattggaatcgcgtttcgggcggagttgggatgttttgataagaagaagttcgggagtggggatattggtacggagtaaatttcgtttagttttgatttttttatagcggttacgttcggacgaacggatcgtcgagcgttaggacgcgtttcgttttttttcgtcgtcgtcgaatcgcgtcgagaggagtcgttagttcggcgcgcggttatttatcgttttcgtcgagtttcgatagtaaatcgacgtttttgttgcggttttaagtgttaagttgtttttagtcggtggttgtttacggtttagtggattagggtatattggtttcggcgggtattttagggggagtgcggtaagtttggcggtcgtcgcggttatatagtcgtttatagcgcgttgataatttacggatttgtttaacgagtgaggcggaaagtagggttaagtcgattaggttttggaggggaggcggggttgtcgttaggggcggagttagtttcggggcgttattagtttatgattggcggagtcgatagttagtcgtggtggcgttgggatcgtttcgtaatcgtcgtttagtcgtttgcggtcgagggtaggttggcgggacgcgtcggcggcggggaagttggttattgcgaagtgtcgtggttgtcggcgggcgttgcgggattttttgtaatgggattcgagtagttttagagggaggcggcggttttagaaggtcgttggttgagagagattaggagttttcggagtcgtcgcgcgtatagcgttgtggagtaagaagttaatcgtagcgcgggtcgatacgttagtatttggtatcggtaggaggcgcggaatttagttgttttatcggaatttcgttcggaggaagttgagggtcgagaaaggatgaatttcggatcgggtcgtttagttataagtggaaatttgggttttttggaaaacgttttgatttcgatttggttatttttgaaataaaattttagtttcgtaaattttttaaagtttagtatacgttttcgtttttatttttgtttttcgggttatttgtagcgggggatttatcggcgtttcgggtttttttttttcgatttagcgcgtcgcggatatagttggcggttaataggaggtttgggcgttcgacggcgtcggaatttgtgagatcgtcgttttgggcgggttgtcgtgcggggtggtattttttgcggtgatttttgttgttttttgggttcgttaggattttaaaattttaggcgggtcgttagaattatttattttcgtggataggaagttttagaacgaattatatttgttttattttgttttcgttttttttttttttcgtaagtttttggttgggatggagatatcggacgagttcggagatttcgattttttaggggttattcgtagtcgaatagtttggaatatggttttgtgggtttttttcgtttaattttttaggattttattgtttattttgttaattagtttttgagtttttattttggttgtagtacgtgttcgtataggcgcgttgagttattaatatagaattaaaagtagggagttgggtgtttttgttttttcgttgaaatttagaatgtaaataagttttagatcgttagttgtgggtgggtaggggtttttttttgtttagaattgtttttgttatgggtaggtatttaattcgtattagtaagaatgaaggaatgtatgtttataataagaaaggggttaatttgttgttttgatatttatttttattatttacgttttgtttttagcgtaagtttattttagattattgttttatttaggttttagaagttttaagggttttagttttttagtatgggtaat

SEQ ID NO: 365 - DNA, 3001 bp, homo sapiens
tggattttgtattgagtggtattgaattgaatgtttgtaaagtttatggatatattttgatttagatagattaggtagatgtagatatgtttatgtatatatatttattaatattttatagtttagaggatttatttttgtgatttaagggaagtttaaggttgaattttttttttatatatttattttatttattttttaattttatatatatatatatttatatatatatatgtatgtatgtgtgtatatgtgtatttatatttttatatatatatatagaattatatattttaatatttttatgtatttttaaaggtttaaatatttttaaattttggatttgtttttgtttagtatttttaaaagtttttatttatgttaaataagaattgtaagaaaatattgtattgaattttgtttattttgtatataatataaattatatgtatgtagttggttttagaaaaataagttgtttttatttttttattattaaggggggaaaataatttaatttagattgagttataaatggagtgttaggtttaattttgagttttttgttgttaatttttgatttaattttattatttaaatatgtaggtgtttaaataaatattaattgattaggttggtaattttttttgtagtttttaggattttttaaggtattgggtattagaattgatagtagtttttgtttggttttaatgaagttttttggatattttttgtgggtggatgtggaggtttgagtattttaggagggttatggatttaagtgttaatagaaagtaattattttagaaagtttaaagtttagtagtgtttttaattttttttagtagttgtagagtattgaagtttttgttatagaatttggttggtattttagttttttggtgttgagatttattttgagtttgatgagtgtttgtttagttttgagatttagatgtggatgttgggttttattgtattgtatagtgtgggtaattttttaggaattgtggtttgtatgttgtgggtgtggaggttgttttagtgttttatgttgttgttgtagaggggtaggggatgtgttttggttttatttatttatgttaattatgttaagttggtgtggattggaattgtgttttgggtggagttgggatgttttgataagaagaagtttgggagtggggatattggtatggagtaaattttgtttagttttgatttttttatagtggttatgtttggatgaatggattgttgagtgttaggatgtgttttgtttttttttgttgttgttgaattgtgttgagaggagttgttagtttggtgtgtggttatttattgtttttgttgagttttgatagtaaattgatgtttttgttgtggttttaagtgttaagttgtttttagttggtggttgtttatggtttagtggattagggtatattggttttggtgggtattttagggggagtgtggtaagtttggtggttgttgtggttatatagttgtttatagtgtgttgataatttatggatttgtttaatgagtgaggtggaaagtagggttaagttgattaggttttggaggggaggtggggttgttgttaggggtggagttagttttggggtgttattagtttatgattggtggagttgatagttagttgtggtggtgttgggattgttttgtaattgttgtttagttgtttgtggttgagggtaggttggtgggatgtgttggtggtggggaagttggttattgtgaagtgttgtggttgttggtgggtgttgtgggattttttgtaatgggatttgagtagttttagagggaggtggtggttttagaaggttgttggttgagagagattaggagtttttggagttgttgtgtgtatagtgttgtggagtaagaagttaattgtagtgtgggttgatatgttagtatttggtattggtaggaggtgtggaatttagttgttttattggaattttgtttggaggaagttgagggttgagaaaggatgaattttggattgggttgtttagttataagtggaaatttgggttttttggaaaatgttttgattttgatttggttatttttgaaataaaattttagttttgtaaattttttaaagtttagtatatgtttttgtttttatttttgttttttgggttatttgtagtgggggatttattggtgttttgggttttttttttttgatttagtgtgttgtggatatagttggtggttaataggaggtttgggtgtttgatggtgttggaatttgtgagattgttgttttgggtgggttgttgtgtggggtggtattttttgtggtgatttttgttgttttttgggtttgttaggattttaaaattttaggtgggttgttagaattatttatttttgtggataggaagttttagaatgaattatatttgttttattttgtttttgtttttttttttttttgtaagtttttggttgggatggagatattggatgagtttggagattttgattttttaggggttatttgtagttgaatagtttggaatatggttttgtgggttttttttgtttaattttttaggattttattgtttattttgttaattagtttttgagtttttattttggttgtagtatgtgtttgtataggtgtgttgagttattaatatagaattaaaagtagggagttgggtgtttttgtttttttgttgaaatttagaatgtaaataagttttagattgttagttgtgggtgggtaggggtttttttttgtttagaattgtttttgttatgggtaggtatttaatttgtattagtaagaatgaaggaatgtatgtttataataagaaaggggttaatttgttgttttgatatttatttttattatttatgttttgtttttagtgtaagtttattttagattattgttttatttaggttttagaagttttaagggttttagttttttagtatgggtaat

SEQ ID NO: 366 - DNA, 50 bp, homo sapiens
cgcctcccgctgcatctggctgccccggccaacagtgtcccttacctgcg

SEQ ID NO: 367 - DNA, 50 bp, homo sapiens
cgtttttcgttgtatttggttgtttcggttaatagtgttttttatttgcg

SEQ ID NO: 368 - DNA, 50 bp, homo sapiens
tgttttttgttgtatttggttgttttggttaatagtgttttttatttgtg

SEQ ID NO: 369 - DNA, 50 bp, homo sapiens
cgtaggtaagggatattgttggtcggggtagttagatgtagcgggaggcg

SEQ ID NO: 370 - DNA, 50 bp, homo sapiens
tgtaggtaagggatattgttggttggggtagttagatgtagtgggaggtg

SEQ ID NO: 371 - DNA, 3001 bp, homo sapiens
tcctttctaaaacatgaagtcctttacacccaatccaacaaaaacaaaaggatcattctcatctgttgcaacacaggatctcagagaggatcgttttaaacacactgtgaatgaacgtagtatacagattccaagatttcttaggatgttctaactccttctccaagccctctcacccgtaagacaggcattctttcctaggagaattacattttctggtgggtttctatggtcaccacatatgcctagccttgtatgaccaagaccaggaggtcacctggccatttggaagccaaagacacagctctgcttatagttttactcatctctgcacacgttcttcaacgaattcttcttcctctggaacatacccctgagtgagctatgtgcagaccccttggttttcacgaaccccaagaccccggctggggcttgtgttcattgccaggttgtgctctacctgatcttactgaagatacatggatttggggtaacttagaagactgttttatgctttacactgactcccatctgcttttgcaaacttgaatgattctgactcaaaatattagatttttggtcaataatccttttatttattgaagccaaaaggtatattatgaaggccaaaattataaaacactttgattttatctcatctgtaaaatgagcagaagaaactgttagattgcttaaaaatccttccaacactgaacttataaatgacaatagtaggctgcgtgtggtggctcatgcctataaatcccagcattttgggaggctgaggcaggcagattgcttgaggtcaggagatcaagaccagcctgagcaacatggtgaaaccccgcctctactaaaaatacaaaaattagccagacatggtggtgcacacctgtagtcccagctactcaggaggctgaggcagaagaatcacttgaacccaggagacagaggttgcagtgagccgagatcgggccaccgcaccccagcttgggcaacacaacaagaccctgtctcaaaaaaatgaaaaaaaaaattaatattaaaaaaatcgtcttcattttagaaaagaagaaactgggcttaaagtaatgttgaacaattaactcaaagtcaaatactggcagagcagattttaggactctgaaagatatcctttcagtcactgtgctataagcctaggttcagctcccaggcaatgtcctgtgagctgaacgagggaagacagaccgcatagacatttcagtttaaagtgtcaatatcttccctgagtccctgccattctattatattgctgacaatagaatgatctataacccaactattgatcgattaacatagtttgtgaaaagcaaacaaaatcagcttcctggtcaacattgcccacttcagttttacaaagagaacattaccaaatcctaccccctagaggtcgagctcccatactggtgaccagagtgacattccagaaaggttttgggaacccaagtgcagccaggacgcctcccgctgcatctggctgccccggccaacagtgtcccttacctgcggctcctgcaggcggctgccacgtgatgaaccggagcccgttcctgactcgggagggctgctttcccgggtagtagccaaatgtgatgactcggctaaattttcccagccctgaattcctaacatacaagaagggaaattaggaggtgacgcagggtctgtccaggataacgggtcggcacagagtgttggaaagtgagaatcaaataagaggggaaagtcaaagtttatagagtatttgggcaggggagggaattgttctggaatgaaaccgacaagaatattgtagggtggcacaagcatgacttgctacctttgcttccccacgccatgctgaggtgtttttccttctccttgctgtgatttcccctccttcttccctcatgccagcctggtcgacactttctgcagaaattctgcagatggcaattctggggacctttcctctgcaccaaacaaaacctccctgccaaggcccgttccccatgcggccgcgagatggcggcatgactcaatggacgggttccaggcgacccctgcacaaagccgccgccgtggctgcctccttccttacataatcctgttagagcgcatttaatctaaggatgggacactgtgttccatgccaagcagcctcatcgtggctgattgttgcaccaacaacaagagctttaaccgttgacgtcccttcctgctcaagaaacaccgtatgtcccgaaaggagcgatttaagctctcaaaatgatttattggtaaaaagcaaagcaaaattaaaaccggggaattacagcacctgcagaatttaggagcctctctctctcatcagccctccttccctgactctccaaacacgtgcataaatctatttaacaataattagttatcgtctcgctctgcattgggtcataaagggagaaaatatgtcctgaaaggaaaaaagaacagttatattttcaaagacagaggcacttattgttatgctaatagataacattcaattaaaacttctgtgtgccaaatgttgtgataaatattacatagactatctcattcaattgttacatcaaaccaaaggttaatactcctactatagtctccattttaaggctggagaaactgaggcacagggagattaccttgacaaaggtcatgcagttaatttgtggcagttaaaattcagctacaggcaggctaatgtaagagcttggactcagccatgatgctatgcactggactggtctagaaaacccaggagataaacagaaaaatataaaccagagaactatgtcagagtggaagatgaaagaaaaaggcagaaagaaaatcgatgctgctgagaaaataagaagaatgaggctaaaacaccaccctcttcagattaagttacaagggaaccactgtgacatttgaggacacaatttcaatagagtgacagagaaaggaagctagactg

SEQ ID NO: 372 - DNA, 3001 bp, homo sapiens
ttttttttaaaatatgaagttttttatatttaatttaataaaaataaaaggattatttttatttgttgtaatataggattttagagaggatcgttttaaatatattgtgaatgaacgtagtatatagattttaagattttttaggatgttttaattttttttttaagtttttttattcgtaagataggtatttttttttaggagaattatattttttggtgggtttttatggttattatatatgtttagttttgtatgattaagattaggaggttatttggttatttggaagttaaagatatagttttgtttatagttttatttatttttgtatacgttttttaacgaatttttttttttttggaatatatttttgagtgagttatgtgtagattttttggtttttacgaattttaagatttcggttggggtttgtgtttattgttaggttgtgttttatttgattttattgaagatatatggatttggggtaatttagaagattgttttatgttttatattgatttttatttgtttttgtaaatttgaatgattttgatttaaaatattagatttttggttaataatttttttatttattgaagttaaaaggtatattatgaaggttaaaattataaaatattttgattttattttatttgtaaaatgagtagaagaaattgttagattgtttaaaaatttttttaatattgaatttataaatgataatagtaggttgcgtgtggtggtttatgtttataaattttagtattttgggaggttgaggtaggtagattgtttgaggttaggagattaagattagtttgagtaatatggtgaaatttcgtttttattaaaaatataaaaattagttagatatggtggtgtatatttgtagttttagttatttaggaggttgaggtagaagaattatttgaatttaggagatagaggttgtagtgagtcgagatcgggttatcgtattttagtttgggtaatataataagattttgttttaaaaaaatgaaaaaaaaaattaatattaaaaaaatcgtttttattttagaaaagaagaaattgggtttaaagtaatgttgaataattaatttaaagttaaatattggtagagtagattttaggattttgaaagatatttttttagttattgtgttataagtttaggtttagtttttaggtaatgttttgtgagttgaacgagggaagatagatcgtatagatattttagtttaaagtgttaatattttttttgagtttttgttattttattatattgttgataatagaatgatttataatttaattattgatcgattaatatagtttgtgaaaagtaaataaaattagttttttggttaatattgtttattttagttttataaagagaatattattaaattttattttttagaggtcgagtttttatattggtgattagagtgatattttagaaaggttttgggaatttaagtgtagttaggacgtttttcgttgtatttggttgtttcggttaatagtgttttttatttgcggtttttgtaggcggttgttacgtgatgaatcggagttcgtttttgattcgggagggttgttttttcgggtagtagttaaatgtgatgattcggttaaatttttttagttttgaatttttaatatataagaagggaaattaggaggtgacgtagggtttgtttaggataacgggtcggtatagagtgttggaaagtgagaattaaataagaggggaaagttaaagtttatagagtatttgggtaggggagggaattgttttggaatgaaatcgataagaatattgtagggtggtataagtatgatttgttatttttgtttttttacgttatgttgaggtgtttttttttttttttgttgtgattttttttttttttttttttatgttagtttggtcgatattttttgtagaaattttgtagatggtaattttggggattttttttttgtattaaataaaatttttttgttaaggttcgttttttatgcggtcgcgagatggcggtatgatttaatggacgggttttaggcgatttttgtataaagtcgtcgtcgtggttgtttttttttttatataattttgttagagcgtatttaatttaaggatgggatattgtgttttatgttaagtagttttatcgtggttgattgttgtattaataataagagttttaatcgttgacgtttttttttgtttaagaaatatcgtatgtttcgaaaggagcgatttaagtttttaaaatgatttattggtaaaaagtaaagtaaaattaaaatcggggaattatagtatttgtagaatttaggagttttttttttttattagttttttttttttgattttttaaatacgtgtataaatttatttaataataattagttatcgtttcgttttgtattgggttataaagggagaaaatatgttttgaaaggaaaaaagaatagttatatttttaaagatagaggtatttattgttatgttaatagataatatttaattaaaatttttgtgtgttaaatgttgtgataaatattatatagattattttatttaattgttatattaaattaaaggttaatatttttattatagtttttattttaaggttggagaaattgaggtatagggagattattttgataaaggttatgtagttaatttgtggtagttaaaatttagttataggtaggttaatgtaagagtttggatttagttatgatgttatgtattggattggtttagaaaatttaggagataaatagaaaaatataaattagagaattatgttagagtggaagatgaaagaaaaaggtagaaagaaaatcgatgttgttgagaaaataagaagaatgaggttaaaatattattttttttagattaagttataagggaattattgtgatatttgaggatataattttaatagagtgatagagaaaggaagttagattg

SEQ ID NO: 373 - DNA, 3001 bp, homo sapiens
ttttttttaaaatatgaagttttttatatttaatttaataaaaataaaaggattatttttatttgttgtaatataggattttagagaggattgttttaaatatattgtgaatgaatgtagtatatagattttaagattttttaggatgttttaattttttttttaagtttttttatttgtaagataggtatttttttttaggagaattatattttttggtgggtttttatggttattatatatgtttagttttgtatgattaagattaggaggttatttggttatttggaagttaaagatatagttttgtttatagttttatttatttttgtatatgttttttaatgaatttttttttttttggaatatatttttgagtgagttatgtgtagattttttggtttttatgaattttaagattttggttggggtttgtgtttattgttaggttgtgttttatttgattttattgaagatatatggatttggggtaatttagaagattgttttatgttttatattgatttttatttgtttttgtaaatttgaatgattttgatttaaaatattagatttttggttaataatttttttatttattgaagttaaaaggtatattatgaaggttaaaattataaaatattttgattttattttatttgtaaaatgagtagaagaaattgttagattgtttaaaaatttttttaatattgaatttataaatgataatagtaggttgtgtgtggtggtttatgtttataaattttagtattttgggaggttgaggtaggtagattgtttgaggttaggagattaagattagtttgagtaatatggtgaaattttgtttttattaaaaatataaaaattagttagatatggtggtgtatatttgtagttttagttatttaggaggttgaggtagaagaattatttgaatttaggagatagaggttgtagtgagttgagattgggttattgtattttagtttgggtaatataataagattttgttttaaaaaaatgaaaaaaaaaattaatattaaaaaaattgtttttattttagaaaagaagaaattgggtttaaagtaatgttgaataattaatttaaagttaaatattggtagagtagattttaggattttgaaagatatttttttagttattgtgttataagtttaggtttagtttttaggtaatgttttgtgagttgaatgagggaagatagattgtatagatattttagtttaaagtgttaatattttttttgagtttttgttattttattatattgttgataatagaatgatttataatttaattattgattgattaatatagtttgtgaaaagtaaataaaattagttttttggttaatattgtttattttagttttataaagagaatattattaaattttattttttagaggttgagtttttatattggtgattagagtgatattttagaaaggttttgggaatttaagtgtagttaggatgttttttgttgtatttggttgttttggttaatagtgttttttatttgtggtttttgtaggtggttgttatgtgatgaattggagtttgtttttgatttgggagggttgtttttttgggtagtagttaaatgtgatgatttggttaaatttttttagttttgaatttttaatatataagaagggaaattaggaggtgatgtagggtttgtttaggataatgggttggtatagagtgttggaaagtgagaattaaataagaggggaaagttaaagtttatagagtatttgggtaggggagggaattgttttggaatgaaattgataagaatattgtagggtggtataagtatgatttgttatttttgtttttttatgttatgttgaggtgtttttttttttttttgttgtgattttttttttttttttttttatgttagtttggttgatattttttgtagaaattttgtagatggtaattttggggattttttttttgtattaaataaaatttttttgttaaggtttgttttttatgtggttgtgagatggtggtatgatttaatggatgggttttaggtgatttttgtataaagttgttgttgtggttgtttttttttttatataattttgttagagtgtatttaatttaaggatgggatattgtgttttatgttaagtagttttattgtggttgattgttgtattaataataagagttttaattgttgatgtttttttttgtttaagaaatattgtatgttttgaaaggagtgatttaagtttttaaaatgatttattggtaaaaagtaaagtaaaattaaaattggggaattatagtatttgtagaatttaggagttttttttttttattagttttttttttttgattttttaaatatgtgtataaatttatttaataataattagttattgttttgttttgtattgggttataaagggagaaaatatgttttgaaaggaaaaaagaatagttatatttttaaagatagaggtatttattgttatgttaatagataatatttaattaaaatttttgtgtgttaaatgttgtgataaatattatatagattattttatttaattgttatattaaattaaaggttaatatttttattatagtttttattttaaggttggagaaattgaggtatagggagattattttgataaaggttatgtagttaatttgtggtagttaaaatttagttataggtaggttaatgtaagagtttggatttagttatgatgttatgtattggattggtttagaaaatttaggagataaatagaaaaatataaattagagaattatgttagagtggaagatgaaagaaaaaggtagaaagaaaattgatgttgttgagaaaataagaagaatgaggttaaaatattattttttttagattaagttataagggaattattgtgatatttgaggatataattttaatagagtgatagagaaaggaagttagattg

SEQ ID NO: 374 - DNA, 3001 bp, homo sapiens
tagtttagttttttttttttgttattttattgaaattgtgtttttaaatgttatagtggtttttttgtaatttaatttgaagagggtggtgttttagttttattttttttatttttttagtagtatcgattttttttttgttttttttttttattttttattttgatatagttttttggtttatatttttttgtttattttttgggttttttagattagtttagtgtatagtattatggttgagtttaagtttttatattagtttgtttgtagttgaattttaattgttataaattaattgtatgatttttgttaaggtaatttttttgtgttttagtttttttagttttaaaatggagattatagtaggagtattaatttttggtttgatgtaataattgaatgagatagtttatgtaatatttattataatatttggtatatagaagttttaattgaatgttatttattagtataataataagtgtttttgtttttgaaaatataattgtttttttttttttttaggatatattttttttttttatgatttaatgtagagcgagacgataattaattattgttaaatagatttatgtacgtgtttggagagttagggaaggagggttgatgagagagagaggtttttaaattttgtaggtgttgtaatttttcggttttaattttgttttgttttttattaataaattattttgagagtttaaatcgtttttttcgggatatacggtgttttttgagtaggaagggacgttaacggttaaagtttttgttgttggtgtaataattagttacgatgaggttgtttggtatggaatatagtgttttatttttagattaaatgcgttttaataggattatgtaaggaaggaggtagttacggcggcggttttgtgtaggggtcgtttggaattcgtttattgagttatgtcgttatttcgcggtcgtatggggaacgggttttggtagggaggttttgtttggtgtagaggaaaggtttttagaattgttatttgtagaatttttgtagaaagtgtcgattaggttggtatgagggaagaaggaggggaaattatagtaaggagaaggaaaaatattttagtatggcgtggggaagtaaaggtagtaagttatgtttgtgttattttataatatttttgtcggttttattttagaataatttttttttttgtttaaatattttataaattttgattttttttttttatttgatttttattttttaatattttgtgtcgattcgttattttggatagattttgcgttattttttaatttttttttttgtatgttaggaatttagggttgggaaaatttagtcgagttattatatttggttattattcgggaaagtagttttttcgagttaggaacgggtttcggtttattacgtggtagtcgtttgtaggagtcgtaggtaagggatattgttggtcggggtagttagatgtagcgggaggcgttttggttgtatttgggtttttaaaatttttttggaatgttattttggttattagtatgggagttcgatttttagggggtaggatttggtaatgttttttttgtaaaattgaagtgggtaatgttgattaggaagttgattttgtttgttttttataaattatgttaatcgattaatagttgggttatagattattttattgttagtaatataatagaatggtagggatttagggaagatattgatattttaaattgaaatgtttatgcggtttgttttttttcgtttagtttataggatattgtttgggagttgaatttaggtttatagtatagtgattgaaaggatattttttagagttttaaaatttgttttgttagtatttgattttgagttaattgtttaatattattttaagtttagtttttttttttttaaaatgaagacgatttttttaatattaatttttttttttatttttttgagatagggttttgttgtgttgtttaagttggggtgcggtggttcgatttcggtttattgtaatttttgttttttgggtttaagtgatttttttgttttagttttttgagtagttgggattataggtgtgtattattatgtttggttaatttttgtatttttagtagaggcggggttttattatgttgtttaggttggttttgattttttgattttaagtaatttgtttgttttagttttttaaaatgttgggatttataggtatgagttattatacgtagtttattattgttatttataagtttagtgttggaaggatttttaagtaatttaatagttttttttgtttattttatagatgagataaaattaaagtgttttataattttggtttttataatatattttttggttttaataaataaaaggattattgattaaaaatttaatattttgagttagaattatttaagtttgtaaaagtagatgggagttagtgtaaagtataaaatagttttttaagttattttaaatttatgtatttttagtaagattaggtagagtataatttggtaatgaatataagttttagtcggggttttggggttcgtgaaaattaaggggtttgtatatagtttatttaggggtatgttttagaggaagaagaattcgttgaagaacgtgtgtagagatgagtaaaattataagtagagttgtgtttttggtttttaaatggttaggtgattttttggttttggttatataaggttaggtatatgtggtgattatagaaatttattagaaaatgtaatttttttaggaaagaatgtttgttttacgggtgagagggtttggagaaggagttagaatattttaagaaattttggaatttgtatattacgtttatttatagtgtgtttaaaacgattttttttgagattttgtgttgtaatagatgagaatgatttttttgtttttgttggattgggtgtaaaggattttatgttttagaaagga

SEQ ID NO: 375 - DNA, 3001 bp, homo sapiens
tagtttagttttttttttttgttattttattgaaattgtgtttttaaatgttatagtggtttttttgtaatttaatttgaagagggtggtgttttagttttattttttttatttttttagtagtattgattttttttttgttttttttttttattttttattttgatatagttttttggtttatatttttttgtttattttttgggttttttagattagtttagtgtatagtattatggttgagtttaagtttttatattagtttgtttgtagttgaattttaattgttataaattaattgtatgatttttgttaaggtaatttttttgtgttttagtttttttagttttaaaatggagattatagtaggagtattaatttttggtttgatgtaataattgaatgagatagtttatgtaatatttattataatatttggtatatagaagttttaattgaatgttatttattagtataataataagtgtttttgtttttgaaaatataattgtttttttttttttttaggatatattttttttttttatgatttaatgtagagtgagatgataattaattattgttaaatagatttatgtatgtgtttggagagttagggaaggagggttgatgagagagagaggtttttaaattttgtaggtgttgtaattttttggttttaattttgttttgttttttattaataaattattttgagagtttaaattgttttttttgggatatatggtgttttttgagtaggaagggatgttaatggttaaagtttttgttgttggtgtaataattagttatgatgaggttgtttggtatggaatatagtgttttatttttagattaaatgtgttttaataggattatgtaaggaaggaggtagttatggtggtggttttgtgtaggggttgtttggaatttgtttattgagttatgttgttattttgtggttgtatggggaatgggttttggtagggaggttttgtttggtgtagaggaaaggtttttagaattgttatttgtagaatttttgtagaaagtgttgattaggttggtatgagggaagaaggaggggaaattatagtaaggagaaggaaaaatattttagtatggtgtggggaagtaaaggtagtaagttatgtttgtgttattttataatatttttgttggttttattttagaataatttttttttttgtttaaatattttataaattttgattttttttttttatttgatttttattttttaatattttgtgttgatttgttattttggatagattttgtgttattttttaatttttttttttgtatgttaggaatttagggttgggaaaatttagttgagttattatatttggttattatttgggaaagtagtttttttgagttaggaatgggttttggtttattatgtggtagttgtttgtaggagttgtaggtaagggatattgttggttggggtagttagatgtagtgggaggtgttttggttgtatttgggtttttaaaatttttttggaatgttattttggttattagtatgggagtttgatttttagggggtaggatttggtaatgttttttttgtaaaattgaagtgggtaatgttgattaggaagttgattttgtttgttttttataaattatgttaattgattaatagttgggttatagattattttattgttagtaatataatagaatggtagggatttagggaagatattgatattttaaattgaaatgtttatgtggtttgtttttttttgtttagtttataggatattgtttgggagttgaatttaggtttatagtatagtgattgaaaggatattttttagagttttaaaatttgttttgttagtatttgattttgagttaattgtttaatattattttaagtttagtttttttttttttaaaatgaagatgatttttttaatattaatttttttttttatttttttgagatagggttttgttgtgttgtttaagttggggtgtggtggtttgattttggtttattgtaatttttgttttttgggtttaagtgatttttttgttttagttttttgagtagttgggattataggtgtgtattattatgtttggttaatttttgtatttttagtagaggtggggttttattatgttgtttaggttggttttgattttttgattttaagtaatttgtttgttttagttttttaaaatgttgggatttataggtatgagttattatatgtagtttattattgttatttataagtttagtgttggaaggatttttaagtaatttaatagttttttttgtttattttatagatgagataaaattaaagtgttttataattttggtttttataatatattttttggttttaataaataaaaggattattgattaaaaatttaatattttgagttagaattatttaagtttgtaaaagtagatgggagttagtgtaaagtataaaatagttttttaagttattttaaatttatgtatttttagtaagattaggtagagtataatttggtaatgaatataagttttagttggggttttggggtttgtgaaaattaaggggtttgtatatagtttatttaggggtatgttttagaggaagaagaatttgttgaagaatgtgtgtagagatgagtaaaattataagtagagttgtgtttttggtttttaaatggttaggtgattttttggttttggttatataaggttaggtatatgtggtgattatagaaatttattagaaaatgtaatttttttaggaaagaatgtttgttttatgggtgagagggtttggagaaggagttagaatattttaagaaattttggaatttgtatattatgtttatttatagtgtgtttaaaatgattttttttgagattttgtgttgtaatagatgagaatgatttttttgtttttgttggattgggtgtaaaggattttatgttttagaaagga

SEQ ID NO: 376 - DNA, 50 bp, homo sapiens
agcagctttcccggcagaaagtgaattcaaatcgaagatgtttcaccacg

SEQ ID NO: 377 - DNA, 50 bp, homo sapiens
agtagttttttcggtagaaagtgaatttaaatcgaagatgttttattacg

SEQ ID NO: 378 - DNA, 50 bp, homo sapiens
agtagtttttttggtagaaagtgaatttaaattgaagatgttttattatg

SEQ ID NO: 379 - DNA, 50 bp, homo sapiens
cgtggtgaaatattttcgatttgaatttattttttgtcgggaaagttgtt

SEQ ID NO: 380 - DNA, 50 bp, homo sapiens
tgtggtgaaatatttttgatttgaatttattttttgttgggaaagttgtt

SEQ ID NO: 381 - DNA, 3001 bp, homo sapiens
gaggcaccgtagagcgaggcacccgccgcggccgctacagctgcggggccgccgagagggaaggagaggccgaaggcagccggtggcagcatgggcttggcggccatcttcagcttctccagctctgcctcttgtagtctctttgccttggcgcggcggttctggaaccatatcttcacctgcgtctcagtgaggctgagcgagctggagaactccgcgcgctcggcgatggacaggtactgcttctggcggaacttgcgctccagcgccagcagctgcgcggtggtgaagggcgtccgcggcttacggttcgtcttgtgtttgcggagggtgcaggctggggggctcagccgccctgagggccgaaagaaaaaaaaagcaaggggttaagagagaagcattggagcatgatcagcccaagaagtagtaataatagccaaacaataccagatattgagtgccgccaagtgcctcggtgccgggcatcgcgcaaggcacttgaaatatattttctccaattcccattgcaaccccgcaggggagaagttcctgtctactttttgcaaatgaagaaactaagattccaggagaaaaatacccacgttgaaggctcgatgtccacatcttaggcctaaacagctgggaagatgtgaaatcacctttgtgctgcccggcggcttaggaaggccttcatggcgggcctcctcccagggccatccagaggaaaggtggatgttaatacagttgacgaacatgcagaaagaggccctgcgcccagcccaagggcacatttagttttacgcgttggccaaacatttatcagtgcccacggagtgcttcagtgtggggctaggcagttttgtggcatagaatccaaatcaaattctacactttccccggaacacttcgctcctacgggattctaggagtagttcccgcagaccagagatggagcagcgcagaccatcatggagggtgcactgtggccagccctcttagaaacagaaagtgtcatctggagcggagaacgaggggctgctttattctaatgggctttttctttagattgtctcagtcctctgttggatcgcgttcacccctggcgccagggccctctggccccactcaaacgtttgtgtgtgtgtgtgtgtgtgtgtgttgatgttgttgcggggggagtgttgagatcgcctctcccctcaacctgtggcatagtcagcagacatcaacatgcccagctgtctttttcttttggcttcaaaataaacctcaagggtggacagtgaagaagcatcagagcgcaggactagtgcaggtcggggatggggtctgctggggactgcccccggataaaatgtggaacaaattatcccaacacagccgggatcgctttgacttcggggtcttggggcccaaggccctaagcgttggaaaggacactttgcctatgcagcagctttcccggcagaaagtgaattcaaatcgaagatgtttcaccacgcgggttttgcctaagtatgcattttttcacacctctctaaaaaacaaccacaaacaaacagaaaaaacaaaacaaaacaaagaaaacacaacgatcctttggactttcagaccaccaggatgtgagtcaaacgaaatctcgtgttaacaccccgcttcttccctgctggaggccaccgggagtccgggaagcgcttggcccccaactagctttccgccgggccgcccgaggggcgggcgccgagagaaacgtcactcccttcagcggcgacaacccagagcggggccaccttctccggccattaggcttagggagggactggcctttcaaagacgtttaatccccagataaaaatcattcctcagcatcacgccattgaaatctggctgctattatgccgagcaaaataatcggaggaaacgaggaaaacttgggaatttcccgtgctcctgaaatatctccgagcgtgttctctgagtagagcagccagggggccgtgaggccttggagcgaaccgccttgggcacctggagtccactttaatggctcagtcctagacgtttgggagcttcccataggattagcgggggcgccttcccctaattgacttggtgccccgccccctccactggaacctgaatgtccccacccctgaatcatccatccgcccaaagcaccaactatctgcctcaaactcaaagggcatggggaggtagaattctgtaggagcttcggaacctctaggcaaagaggtacttgaaagggaagaggggctgggggacaccagctcctactgcgagaaagtgaaactccgggtgcagggaagataccgcaccacacacattcatccgctggggtgaagccgatgaaacagagtttgggatcagatgagggatcatggacccctgaggtcgtttggtgggggcaggaggacagggtgcccagacatcggtgtcctatccgttaactcccacccgcagcgtctctgggccaaggcgaggaggtctggaaccttcttcctgggtgggagtggagggaggcgcaagacccggccttgcagcccacggctccctagcaccggctgcaggtacgcaggcgccggaggccaccaggagccctcgggtcccacaccccacccggcccccacccggccccctccctctgcgcctgggttctggctactcactggccggcggcggggagaagcgggggctctgcatccacggggtcctctcgggcttctcggggctctcggctttgacgagcgcatcttctggcagcttgaggagtccccccaccgagaaatggccgagcggccgcggcgaagagggcgcgtccggggctcccagcgaccccggcgggacgcccagtggctgcgccgagccacccgccgcctgcacgccctcggagggcgccagggcgctctccttggcccccggcttcctgtggtcggccatgagcgcctccacgctgaagggcaggagcgaaggggacactttg

SEQ ID NO: 382 - DNA, 3001 bp, homo sapiens
gaggtatcgtagagcgaggtattcgtcgcggtcgttatagttgcggggtcgtcgagagggaaggagaggtcgaaggtagtcggtggtagtatgggtttggcggttatttttagtttttttagttttgttttttgtagtttttttgttttggcgcggcggttttggaattatatttttatttgcgttttagtgaggttgagcgagttggagaatttcgcgcgttcggcgatggataggtattgtttttggcggaatttgcgttttagcgttagtagttgcgcggtggtgaagggcgttcgcggtttacggttcgttttgtgtttgcggagggtgtaggttggggggtttagtcgttttgagggtcgaaagaaaaaaaaagtaaggggttaagagagaagtattggagtatgattagtttaagaagtagtaataatagttaaataatattagatattgagtgtcgttaagtgtttcggtgtcgggtatcgcgtaaggtatttgaaatatattttttttaatttttattgtaatttcgtaggggagaagtttttgtttattttttgtaaatgaagaaattaagattttaggagaaaaatatttacgttgaaggttcgatgtttatattttaggtttaaatagttgggaagatgtgaaattatttttgtgttgttcggcggtttaggaaggtttttatggcgggtttttttttagggttatttagaggaaaggtggatgttaatatagttgacgaatatgtagaaagaggttttgcgtttagtttaagggtatatttagttttacgcgttggttaaatatttattagtgtttacggagtgttttagtgtggggttaggtagttttgtggtatagaatttaaattaaattttatatttttttcggaatatttcgtttttacgggattttaggagtagttttcgtagattagagatggagtagcgtagattattatggagggtgtattgtggttagtttttttagaaatagaaagtgttatttggagcggagaacgaggggttgttttattttaatgggttttttttttagattgttttagttttttgttggatcgcgtttatttttggcgttagggttttttggttttatttaaacgtttgtgtgtgtgtgtgtgtgtgtgtgttgatgttgttgcggggggagtgttgagatcgtttttttttttaatttgtggtatagttagtagatattaatatgtttagttgttttttttttttggttttaaaataaattttaagggtggatagtgaagaagtattagagcgtaggattagtgtaggtcggggatggggtttgttggggattgttttcggataaaatgtggaataaattattttaatatagtcgggatcgttttgatttcggggttttggggtttaaggttttaagcgttggaaaggatattttgtttatgtagtagttttttcggtagaaagtgaatttaaatcgaagatgttttattacgcgggttttgtttaagtatgtatttttttatatttttttaaaaaataattataaataaatagaaaaaataaaataaaataaagaaaatataacgattttttggatttttagattattaggatgtgagttaaacgaaatttcgtgttaatatttcgttttttttttgttggaggttatcgggagttcgggaagcgtttggtttttaattagtttttcgtcgggtcgttcgaggggcgggcgtcgagagaaacgttattttttttagcggcgataatttagagcggggttatttttttcggttattaggtttagggagggattggttttttaaagacgtttaatttttagataaaaattattttttagtattacgttattgaaatttggttgttattatgtcgagtaaaataatcggaggaaacgaggaaaatttgggaatttttcgtgtttttgaaatattttcgagcgtgttttttgagtagagtagttagggggtcgtgaggttttggagcgaatcgttttgggtatttggagtttattttaatggtttagttttagacgtttgggagttttttataggattagcgggggcgtttttttttaattgatttggtgtttcgttttttttattggaatttgaatgtttttatttttgaattatttattcgtttaaagtattaattatttgttttaaatttaaagggtatggggaggtagaattttgtaggagtttcggaatttttaggtaaagaggtatttgaaagggaagaggggttgggggatattagtttttattgcgagaaagtgaaatttcgggtgtagggaagatatcgtattatatatatttattcgttggggtgaagtcgatgaaatagagtttgggattagatgagggattatggatttttgaggtcgtttggtgggggtaggaggatagggtgtttagatatcggtgttttattcgttaatttttattcgtagcgtttttgggttaaggcgaggaggtttggaattttttttttgggtgggagtggagggaggcgtaagattcggttttgtagtttacggttttttagtatcggttgtaggtacgtaggcgtcggaggttattaggagttttcgggttttatattttattcggtttttattcggttttttttttttgcgtttgggttttggttatttattggtcggcggcggggagaagcgggggttttgtatttacggggttttttcgggtttttcggggttttcggttttgacgagcgtattttttggtagtttgaggagtttttttatcgagaaatggtcgagcggtcgcggcgaagagggcgcgttcggggtttttagcgatttcggcgggacgtttagtggttgcgtcgagttattcgtcgtttgtacgttttcggagggcgttagggcgttttttttggttttcggttttttgtggtcggttatgagcgtttttacgttgaagggtaggagcgaaggggatattttg

SEQ ID NO: 383 - DNA, 3001 bp, homo sapiens
gaggtattgtagagtgaggtatttgttgtggttgttatagttgtggggttgttgagagggaaggagaggttgaaggtagttggtggtagtatgggtttggtggttatttttagtttttttagttttgttttttgtagtttttttgttttggtgtggtggttttggaattatatttttatttgtgttttagtgaggttgagtgagttggagaattttgtgtgtttggtgatggataggtattgtttttggtggaatttgtgttttagtgttagtagttgtgtggtggtgaagggtgtttgtggtttatggtttgttttgtgtttgtggagggtgtaggttggggggtttagttgttttgagggttgaaagaaaaaaaaagtaaggggttaagagagaagtattggagtatgattagtttaagaagtagtaataatagttaaataatattagatattgagtgttgttaagtgttttggtgttgggtattgtgtaaggtatttgaaatatattttttttaatttttattgtaattttgtaggggagaagtttttgtttattttttgtaaatgaagaaattaagattttaggagaaaaatatttatgttgaaggtttgatgtttatattttaggtttaaatagttgggaagatgtgaaattatttttgtgttgtttggtggtttaggaaggtttttatggtgggtttttttttagggttatttagaggaaaggtggatgttaatatagttgatgaatatgtagaaagaggttttgtgtttagtttaagggtatatttagttttatgtgttggttaaatatttattagtgtttatggagtgttttagtgtggggttaggtagttttgtggtatagaatttaaattaaattttatattttttttggaatattttgtttttatgggattttaggagtagtttttgtagattagagatggagtagtgtagattattatggagggtgtattgtggttagtttttttagaaatagaaagtgttatttggagtggagaatgaggggttgttttattttaatgggttttttttttagattgttttagttttttgttggattgtgtttatttttggtgttagggttttttggttttatttaaatgtttgtgtgtgtgtgtgtgtgtgtgtgttgatgttgttgtggggggagtgttgagattgtttttttttttaatttgtggtatagttagtagatattaatatgtttagttgttttttttttttggttttaaaataaattttaagggtggatagtgaagaagtattagagtgtaggattagtgtaggttggggatggggtttgttggggattgtttttggataaaatgtggaataaattattttaatatagttgggattgttttgattttggggttttggggtttaaggttttaagtgttggaaaggatattttgtttatgtagtagtttttttggtagaaagtgaatttaaattgaagatgttttattatgtgggttttgtttaagtatgtatttttttatatttttttaaaaaataattataaataaatagaaaaaataaaataaaataaagaaaatataatgattttttggatttttagattattaggatgtgagttaaatgaaattttgtgttaatattttgttttttttttgttggaggttattgggagtttgggaagtgtttggtttttaattagttttttgttgggttgtttgaggggtgggtgttgagagaaatgttattttttttagtggtgataatttagagtggggttattttttttggttattaggtttagggagggattggttttttaaagatgtttaatttttagataaaaattattttttagtattatgttattgaaatttggttgttattatgttgagtaaaataattggaggaaatgaggaaaatttgggaattttttgtgtttttgaaatatttttgagtgtgttttttgagtagagtagttagggggttgtgaggttttggagtgaattgttttgggtatttggagtttattttaatggtttagttttagatgtttgggagttttttataggattagtgggggtgtttttttttaattgatttggtgttttgttttttttattggaatttgaatgtttttatttttgaattatttatttgtttaaagtattaattatttgttttaaatttaaagggtatggggaggtagaattttgtaggagttttggaatttttaggtaaagaggtatttgaaagggaagaggggttgggggatattagtttttattgtgagaaagtgaaattttgggtgtagggaagatattgtattatatatatttatttgttggggtgaagttgatgaaatagagtttgggattagatgagggattatggatttttgaggttgtttggtgggggtaggaggatagggtgtttagatattggtgttttatttgttaatttttatttgtagtgtttttgggttaaggtgaggaggtttggaattttttttttgggtgggagtggagggaggtgtaagatttggttttgtagtttatggttttttagtattggttgtaggtatgtaggtgttggaggttattaggagtttttgggttttatattttatttggtttttatttggttttttttttttgtgtttgggttttggttatttattggttggtggtggggagaagtgggggttttgtatttatggggtttttttgggttttttggggtttttggttttgatgagtgtattttttggtagtttgaggagtttttttattgagaaatggttgagtggttgtggtgaagagggtgtgtttggggtttttagtgattttggtgggatgtttagtggttgtgttgagttatttgttgtttgtatgtttttggagggtgttagggtgttttttttggtttttggttttttgtggttggttatgagtgtttttatgttgaagggtaggagtgaaggggatattttg

SEQ ID NO: 384 - DNA, 3001 bp, homo sapiens
taaagtgtttttttcgtttttgttttttagcgtggaggcgtttatggtcgattataggaagtcgggggttaaggagagcgttttggcgtttttcgagggcgtgtaggcggcgggtggttcggcgtagttattgggcgtttcgtcggggtcgttgggagtttcggacgcgtttttttcgtcgcggtcgttcggttatttttcggtggggggattttttaagttgttagaagatgcgttcgttaaagtcgagagtttcgagaagttcgagaggatttcgtggatgtagagttttcgttttttttcgtcgtcggttagtgagtagttagaatttaggcgtagagggagggggtcgggtgggggtcgggtggggtgtgggattcgagggtttttggtggttttcggcgtttgcgtatttgtagtcggtgttagggagtcgtgggttgtaaggtcgggttttgcgtttttttttatttttatttaggaagaaggttttagattttttcgttttggtttagagacgttgcgggtgggagttaacggataggatatcgatgtttgggtattttgtttttttgtttttattaaacgattttaggggtttatgattttttatttgattttaaattttgttttatcggttttattttagcggatgaatgtgtgtggtgcggtattttttttgtattcggagttttattttttcgtagtaggagttggtgttttttagtttttttttttttttaagtatttttttgtttagaggtttcgaagtttttatagaattttatttttttatgttttttgagtttgaggtagatagttggtgttttgggcggatggatgatttaggggtggggatatttaggttttagtggagggggcggggtattaagttaattaggggaaggcgttttcgttaattttatgggaagtttttaaacgtttaggattgagttattaaagtggattttaggtgtttaaggcggttcgttttaaggttttacggttttttggttgttttatttagagaatacgttcggagatattttaggagtacgggaaatttttaagtttttttcgtttttttcgattattttgttcggtataatagtagttagattttaatggcgtgatgttgaggaatgatttttatttggggattaaacgtttttgaaaggttagtttttttttaagtttaatggtcggagaaggtggtttcgttttgggttgtcgtcgttgaagggagtgacgtttttttcggcgttcgtttttcgggcggttcggcggaaagttagttgggggttaagcgtttttcggattttcggtggtttttagtagggaagaagcggggtgttaatacgagatttcgtttgatttatattttggtggtttgaaagtttaaaggatcgttgtgttttttttgttttgttttgttttttttgtttgtttgtggttgttttttagagaggtgtgaaaaaatgtatatttaggtaaaattcgcgtggtgaaatattttcgatttgaatttattttttgtcgggaaagttgttgtataggtaaagtgttttttttaacgtttagggttttgggttttaagatttcgaagttaaagcgatttcggttgtgttgggataatttgttttatattttattcgggggtagtttttagtagattttattttcgatttgtattagttttgcgttttgatgtttttttattgtttatttttgaggtttattttgaagttaaaagaaaaagatagttgggtatgttgatgtttgttgattatgttataggttgaggggagaggcgattttaatatttttttcgtaataatattaatatatatatatatatatatatataaacgtttgagtggggttagagggttttggcgttaggggtgaacgcgatttaatagaggattgagataatttaaagaaaaagtttattagaataaagtagtttttcgtttttcgttttagatgatattttttgtttttaagagggttggttatagtgtattttttatgatggtttgcgttgttttatttttggtttgcgggaattatttttagaatttcgtaggagcgaagtgtttcggggaaagtgtagaatttgatttggattttatgttataaaattgtttagttttatattgaagtatttcgtgggtattgataaatgtttggttaacgcgtaaaattaaatgtgtttttgggttgggcgtagggtttttttttgtatgttcgttaattgtattaatatttattttttttttggatggttttgggaggaggttcgttatgaaggtttttttaagtcgtcgggtagtataaaggtgattttatatttttttagttgtttaggtttaagatgtggatatcgagtttttaacgtgggtattttttttttggaattttagtttttttatttgtaaaaagtagataggaattttttttttgcggggttgtaatgggaattggagaaaatatattttaagtgttttgcgcgatgttcggtatcgaggtatttggcggtatttaatatttggtattgtttggttattattattattttttgggttgattatgttttaatgttttttttttaattttttgttttttttttttttcggtttttagggcggttgagttttttagtttgtatttttcgtaaatataagacgaatcgtaagtcgcggacgttttttattatcgcgtagttgttggcgttggagcgtaagtttcgttagaagtagtatttgtttatcgtcgagcgcgcggagttttttagttcgtttagttttattgagacgtaggtgaagatatggttttagaatcgtcgcgttaaggtaaagagattataagaggtagagttggagaagttgaagatggtcgttaagtttatgttgttatcggttgttttcggtttttttttttttttcggcggtttcgtagttgtagcggtcgcggcgggtgtttcgttttacggtgtttt

SEQ ID NO: 385 - DNA, 3001 bp, homo sapiens
taaagtgttttttttgtttttgttttttagtgtggaggtgtttatggttgattataggaagttgggggttaaggagagtgttttggtgttttttgagggtgtgtaggtggtgggtggtttggtgtagttattgggtgttttgttggggttgttgggagttttggatgtgttttttttgttgtggttgtttggttattttttggtggggggattttttaagttgttagaagatgtgtttgttaaagttgagagttttgagaagtttgagaggattttgtggatgtagagtttttgtttttttttgttgttggttagtgagtagttagaatttaggtgtagagggagggggttgggtgggggttgggtggggtgtgggatttgagggtttttggtggtttttggtgtttgtgtatttgtagttggtgttagggagttgtgggttgtaaggttgggttttgtgtttttttttatttttatttaggaagaaggttttagatttttttgttttggtttagagatgttgtgggtgggagttaatggataggatattgatgtttgggtattttgtttttttgtttttattaaatgattttaggggtttatgattttttatttgattttaaattttgttttattggttttattttagtggatgaatgtgtgtggtgtggtattttttttgtatttggagttttatttttttgtagtaggagttggtgttttttagtttttttttttttttaagtatttttttgtttagaggttttgaagtttttatagaattttatttttttatgttttttgagtttgaggtagatagttggtgttttgggtggatggatgatttaggggtggggatatttaggttttagtggagggggtggggtattaagttaattaggggaaggtgtttttgttaattttatgggaagtttttaaatgtttaggattgagttattaaagtggattttaggtgtttaaggtggtttgttttaaggttttatggttttttggttgttttatttagagaatatgtttggagatattttaggagtatgggaaatttttaagttttttttgttttttttgattattttgtttggtataatagtagttagattttaatggtgtgatgttgaggaatgatttttatttggggattaaatgtttttgaaaggttagtttttttttaagtttaatggttggagaaggtggttttgttttgggttgttgttgttgaagggagtgatgttttttttggtgtttgttttttgggtggtttggtggaaagttagttgggggttaagtgttttttggatttttggtggtttttagtagggaagaagtggggtgttaatatgagattttgtttgatttatattttggtggtttgaaagtttaaaggattgttgtgttttttttgttttgttttgttttttttgtttgtttgtggttgttttttagagaggtgtgaaaaaatgtatatttaggtaaaatttgtgtggtgaaatatttttgatttgaatttattttttgttgggaaagttgttgtataggtaaagtgttttttttaatgtttagggttttgggttttaagattttgaagttaaagtgattttggttgtgttgggataatttgttttatattttatttgggggtagtttttagtagattttatttttgatttgtattagttttgtgttttgatgtttttttattgtttatttttgaggtttattttgaagttaaaagaaaaagatagttgggtatgttgatgtttgttgattatgttataggttgaggggagaggtgattttaatattttttttgtaataatattaatatatatatatatatatatatataaatgtttgagtggggttagagggttttggtgttaggggtgaatgtgatttaatagaggattgagataatttaaagaaaaagtttattagaataaagtagttttttgttttttgttttagatgatattttttgtttttaagagggttggttatagtgtattttttatgatggtttgtgttgttttatttttggtttgtgggaattatttttagaattttgtaggagtgaagtgttttggggaaagtgtagaatttgatttggattttatgttataaaattgtttagttttatattgaagtattttgtgggtattgataaatgtttggttaatgtgtaaaattaaatgtgtttttgggttgggtgtagggtttttttttgtatgtttgttaattgtattaatatttattttttttttggatggttttgggaggaggtttgttatgaaggtttttttaagttgttgggtagtataaaggtgattttatatttttttagttgtttaggtttaagatgtggatattgagtttttaatgtgggtattttttttttggaattttagtttttttatttgtaaaaagtagataggaattttttttttgtggggttgtaatgggaattggagaaaatatattttaagtgttttgtgtgatgtttggtattgaggtatttggtggtatttaatatttggtattgtttggttattattattattttttgggttgattatgttttaatgttttttttttaattttttgtttttttttttttttggtttttagggtggttgagttttttagtttgtattttttgtaaatataagatgaattgtaagttgtggatgttttttattattgtgtagttgttggtgttggagtgtaagttttgttagaagtagtatttgtttattgttgagtgtgtggagttttttagtttgtttagttttattgagatgtaggtgaagatatggttttagaattgttgtgttaaggtaaagagattataagaggtagagttggagaagttgaagatggttgttaagtttatgttgttattggttgtttttggttttttttttttttttggtggttttgtagttgtagtggttgtggtgggtgttttgttttatggtgtttt

SEQ ID NO: 386 - DNA, 1897 bp, homo sapiens
ggcctcacggccccctggctgctctactcagagaacacgctcggagatatttcaggagcacgggaaattcccaagttttcctcgtttcctccgattattttgctcggcataatagcagccagatttcaatggcgtgatgctgaggaatgatttttatctggggattaaacgtctttgaaaggccagtccctccctaagcctaatggccggagaaggtggccccgctctgggttgtcgccgctgaagggagtgacgtttctctcggcgcccgcccctcgggcggcccggcggaaagctagttgggggccaagcgcttcccggactcccggtggcctccagcagggaagaagcggggtgttaacacgagatttcgtttgactcacatcctggtggtctgaaagtccaaaggatcgttgtgttttctttgttttgttttgttttttctgtttgtttgtggttgttttttagagaggtgtgaaaaaatgcatacttaggcaaaacccgcgtggtgaaacatcttcgatttgaattcactttctgccgggaaagctgctgcataggcaaagtgtcctttccaacgcttagggccttgggccccaagaccccgaagtcaaagcgatcccggctgtgttgggataatttgttccacattttatccgggggcagtccccagcagaccccatccccgacctgcactagtcctgcgctctgatgcttcttcactgtccacccttgaggtttattttgaagccaaaagaaaaagacagctgggcatgttgatgtctgctgactatgccacaggttgaggggagaggcgatctcaacactccccccgcaacaacatcaacacacacacacacacacacacacaaacgtttgagtggggccagagggccctggcgccaggggtgaacgcgatccaacagaggactgagacaatctaaagaaaaagcccattagaataaagcagcccctcgttctccgctccagatgacactttctgtttctaagagggctggccacagtgcaccctccatgatggtctgcgctgctccatctctggtctgcgggaactactcctagaatcccgtaggagcgaagtgttccggggaaagtgtagaatttgatttggattctatgccacaaaactgcctagccccacactgaagcactccgtgggcactgataaatgtttggccaacgcgtaaaactaaatgtgcccttgggctgggcgcagggcctctttctgcatgttcgtcaactgtattaacatccacctttcctctggatggccctgggaggaggcccgccatgaaggccttcctaagccgccgggcagcacaaaggtgatttcacatcttcccagctgtttaggcctaagatgtggacatcgagccttcaacgtgggtatttttctcctggaatcttagtttcttcatttgcaaaaagtagacaggaacttctcccctgcggggttgcaatgggaattggagaaaatatatttcaagtgccttgcgcgatgcccggcaccgaggcacttggcggcactcaatatctggtattgtttggctattattactacttcttgggctgatcatgctccaatgcttctctcttaaccccttgctttttttttctttcggccctcagggcggctgagccccccagcctgcaccctccgcaaacacaagacgaaccgtaagccgcggacgcccttcaccaccgcgcagctgctggcgctggagcgcaagttccgccagaagcagtacctgtccatcgccgagcgcgcggagttctccagctcgctcagcctcactgagacgcaggtgaagatatggttccagaaccgccgcgccaaggcaaagagactacaagaggcagagctggagaagctgaa

SEQ ID NO: 387 - DNA, 1897 bp, homo sapiens
ggttttacggttttttggttgttttatttagagaatacgttcggagatattttaggagtacgggaaatttttaagtttttttcgtttttttcgattattttgttcggtataatagtagttagattttaatggcgtgatgttgaggaatgatttttatttggggattaaacgtttttgaaaggttagtttttttttaagtttaatggtcggagaaggtggtttcgttttgggttgtcgtcgttgaagggagtgacgtttttttcggcgttcgtttttcgggcggttcggcggaaagttagttgggggttaagcgtttttcggattttcggtggtttttagtagggaagaagcggggtgttaatacgagatttcgtttgatttatattttggtggtttgaaagtttaaaggatcgttgtgttttttttgttttgttttgttttttttgtttgtttgtggttgttttttagagaggtgtgaaaaaatgtatatttaggtaaaattcgcgtggtgaaatattttcgatttgaatttattttttgtcgggaaagttgttgtataggtaaagtgttttttttaacgtttagggttttgggttttaagatttcgaagttaaagcgatttcggttgtgttgggataatttgttttatattttattcgggggtagtttttagtagattttattttcgatttgtattagttttgcgttttgatgtttttttattgtttatttttgaggtttattttgaagttaaaagaaaaagatagttgggtatgttgatgtttgttgattatgttataggttgaggggagaggcgattttaatatttttttcgtaataatattaatatatatatatatatatatatataaacgtttgagtggggttagagggttttggcgttaggggtgaacgcgatttaatagaggattgagataatttaaagaaaaagtttattagaataaagtagtttttcgtttttcgttttagatgatattttttgtttttaagagggttggttatagtgtattttttatgatggtttgcgttgttttatttttggtttgcgggaattatttttagaatttcgtaggagcgaagtgtttcggggaaagtgtagaatttgatttggattttatgttataaaattgtttagttttatattgaagtatttcgtgggtattgataaatgtttggttaacgcgtaaaattaaatgtgtttttgggttgggcgtagggtttttttttgtatgttcgttaattgtattaatatttattttttttttggatggttttgggaggaggttcgttatgaaggtttttttaagtcgtcgggtagtataaaggtgattttatatttttttagttgtttaggtttaagatgtggatatcgagtttttaacgtgggtattttttttttggaattttagtttttttatttgtaaaaagtagataggaattttttttttgcggggttgtaatgggaattggagaaaatatattttaagtgttttgcgcgatgttcggtatcgaggtatttggcggtatttaatatttggtattgtttggttattattattattttttgggttgattatgttttaatgttttttttttaattttttgttttttttttttttcggtttttagggcggttgagttttttagtttgtatttttcgtaaatataagacgaatcgtaagtcgcggacgttttttattatcgcgtagttgttggcgttggagcgtaagtttcgttagaagtagtatttgtttatcgtcgagcgcgcggagttttttagttcgtttagttttattgagacgtaggtgaagatatggttttagaatcgtcgcgttaaggtaaagagattataagaggtagagttggagaagttgaa

SEQ ID NO: 388 - DNA, 1897 bp, homo sapiens
ggttttatggttttttggttgttttatttagagaatatgtttggagatattttaggagtatgggaaatttttaagttttttttgttttttttgattattttgtttggtataatagtagttagattttaatggtgtgatgttgaggaatgatttttatttggggattaaatgtttttgaaaggttagtttttttttaagtttaatggttggagaaggtggttttgttttgggttgttgttgttgaagggagtgatgttttttttggtgtttgttttttgggtggtttggtggaaagttagttgggggttaagtgttttttggatttttggtggtttttagtagggaagaagtggggtgttaatatgagattttgtttgatttatattttggtggtttgaaagtttaaaggattgttgtgttttttttgttttgttttgttttttttgtttgtttgtggttgttttttagagaggtgtgaaaaaatgtatatttaggtaaaatttgtgtggtgaaatatttttgatttgaatttattttttgttgggaaagttgttgtataggtaaagtgttttttttaatgtttagggttttgggttttaagattttgaagttaaagtgattttggttgtgttgggataatttgttttatattttatttgggggtagtttttagtagattttatttttgatttgtattagttttgtgttttgatgtttttttattgtttatttttgaggtttattttgaagttaaaagaaaaagatagttgggtatgttgatgtttgttgattatgttataggttgaggggagaggtgattttaatattttttttgtaataatattaatatatatatatatatatatatataaatgtttgagtggggttagagggttttggtgttaggggtgaatgtgatttaatagaggattgagataatttaaagaaaaagtttattagaataaagtagttttttgttttttgttttagatgatattttttgtttttaagagggttggttatagtgtattttttatgatggtttgtgttgttttatttttggtttgtgggaattatttttagaattttgtaggagtgaagtgttttggggaaagtgtagaatttgatttggattttatgttataaaattgtttagttttatattgaagtattttgtgggtattgataaatgtttggttaatgtgtaaaattaaatgtgtttttgggttgggtgtagggtttttttttgtatgtttgttaattgtattaatatttattttttttttggatggttttgggaggaggtttgttatgaaggtttttttaagttgttgggtagtataaaggtgattttatatttttttagttgtttaggtttaagatgtggatattgagtttttaatgtgggtattttttttttggaattttagtttttttatttgtaaaaagtagataggaattttttttttgtggggttgtaatgggaattggagaaaatatattttaagtgttttgtgtgatgtttggtattgaggtatttggtggtatttaatatttggtattgtttggttattattattattttttgggttgattatgttttaatgttttttttttaattttttgtttttttttttttttggtttttagggtggttgagttttttagtttgtattttttgtaaatataagatgaattgtaagttgtggatgttttttattattgtgtagttgttggtgttggagtgtaagttttgttagaagtagtatttgtttattgttgagtgtgtggagttttttagtttgtttagttttattgagatgtaggtgaagatatggttttagaattgttgtgttaaggtaaagagattataagaggtagagttggagaagttgaa

SEQ ID NO: 389 - DNA, 1897 bp, homo sapiens
tttagtttttttagttttgttttttgtagtttttttgttttggcgcggcggttttggaattatatttttatttgcgttttagtgaggttgagcgagttggagaatttcgcgcgttcggcgatggataggtattgtttttggcggaatttgcgttttagcgttagtagttgcgcggtggtgaagggcgttcgcggtttacggttcgttttgtgtttgcggagggtgtaggttggggggtttagtcgttttgagggtcgaaagaaaaaaaaagtaaggggttaagagagaagtattggagtatgattagtttaagaagtagtaataatagttaaataatattagatattgagtgtcgttaagtgtttcggtgtcgggtatcgcgtaaggtatttgaaatatattttttttaatttttattgtaatttcgtaggggagaagtttttgtttattttttgtaaatgaagaaattaagattttaggagaaaaatatttacgttgaaggttcgatgtttatattttaggtttaaatagttgggaagatgtgaaattatttttgtgttgttcggcggtttaggaaggtttttatggcgggtttttttttagggttatttagaggaaaggtggatgttaatatagttgacgaatatgtagaaagaggttttgcgtttagtttaagggtatatttagttttacgcgttggttaaatatttattagtgtttacggagtgttttagtgtggggttaggtagttttgtggtatagaatttaaattaaattttatatttttttcggaatatttcgtttttacgggattttaggagtagttttcgtagattagagatggagtagcgtagattattatggagggtgtattgtggttagtttttttagaaatagaaagtgttatttggagcggagaacgaggggttgttttattttaatgggttttttttttagattgttttagttttttgttggatcgcgtttatttttggcgttagggttttttggttttatttaaacgtttgtgtgtgtgtgtgtgtgtgtgtgttgatgttgttgcggggggagtgttgagatcgtttttttttttaatttgtggtatagttagtagatattaatatgtttagttgttttttttttttggttttaaaataaattttaagggtggatagtgaagaagtattagagcgtaggattagtgtaggtcggggatggggtttgttggggattgttttcggataaaatgtggaataaattattttaatatagtcgggatcgttttgatttcggggttttggggtttaaggttttaagcgttggaaaggatattttgtttatgtagtagttttttcggtagaaagtgaatttaaatcgaagatgttttattacgcgggttttgtttaagtatgtatttttttatatttttttaaaaaataattataaataaatagaaaaaataaaataaaataaagaaaatataacgattttttggatttttagattattaggatgtgagttaaacgaaatttcgtgttaatatttcgttttttttttgttggaggttatcgggagttcgggaagcgtttggtttttaattagtttttcgtcgggtcgttcgaggggcgggcgtcgagagaaacgttattttttttagcggcgataatttagagcggggttatttttttcggttattaggtttagggagggattggttttttaaagacgtttaatttttagataaaaattattttttagtattacgttattgaaatttggttgttattatgtcgagtaaaataatcggaggaaacgaggaaaatttgggaatttttcgtgtttttgaaatattttcgagcgtgttttttgagtagagtagttagggggtcgtgaggtt

SEQ ID NO: 390 - DNA, 1897 bp, homo sapiens
tttagtttttttagttttgttttttgtagtttttttgttttggtgtggtggttttggaattatatttttatttgtgttttagtgaggttgagtgagttggagaattttgtgtgtttggtgatggataggtattgtttttggtggaatttgtgttttagtgttagtagttgtgtggtggtgaagggtgtttgtggtttatggtttgttttgtgtttgtggagggtgtaggttggggggtttagttgttttgagggttgaaagaaaaaaaaagtaaggggttaagagagaagtattggagtatgattagtttaagaagtagtaataatagttaaataatattagatattgagtgttgttaagtgttttggtgttgggtattgtgtaaggtatttgaaatatattttttttaatttttattgtaattttgtaggggagaagtttttgtttattttttgtaaatgaagaaattaagattttaggagaaaaatatttatgttgaaggtttgatgtttatattttaggtttaaatagttgggaagatgtgaaattatttttgtgttgtttggtggtttaggaaggtttttatggtgggtttttttttagggttatttagaggaaaggtggatgttaatatagttgatgaatatgtagaaagaggttttgtgtttagtttaagggtatatttagttttatgtgttggttaaatatttattagtgtttatggagtgttttagtgtggggttaggtagttttgtggtatagaatttaaattaaattttatattttttttggaatattttgtttttatgggattttaggagtagtttttgtagattagagatggagtagtgtagattattatggagggtgtattgtggttagtttttttagaaatagaaagtgttatttggagtggagaatgaggggttgttttattttaatgggttttttttttagattgttttagttttttgttggattgtgtttatttttggtgttagggttttttggttttatttaaatgtttgtgtgtgtgtgtgtgtgtgtgtgttgatgttgttgtggggggagtgttgagattgtttttttttttaatttgtggtatagttagtagatattaatatgtttagttgttttttttttttggttttaaaataaattttaagggtggatagtgaagaagtattagagtgtaggattagtgtaggttggggatggggtttgttggggattgtttttggataaaatgtggaataaattattttaatatagttgggattgttttgattttggggttttggggtttaaggttttaagtgttggaaaggatattttgtttatgtagtagtttttttggtagaaagtgaatttaaattgaagatgttttattatgtgggttttgtttaagtatgtatttttttatatttttttaaaaaataattataaataaatagaaaaaataaaataaaataaagaaaatataatgattttttggatttttagattattaggatgtgagttaaatgaaattttgtgttaatattttgttttttttttgttggaggttattgggagtttgggaagtgtttggtttttaattagttttttgttgggttgtttgaggggtgggtgttgagagaaatgttattttttttagtggtgataatttagagtggggttattttttttggttattaggtttagggagggattggttttttaaagatgtttaatttttagataaaaattattttttagtattatgttattgaaatttggttgttattatgttgagtaaaataattggaggaaatgaggaaaatttgggaattttttgtgtttttgaaatatttttgagtgtgttttttgagtagagtagttagggggttgtgaggtt

SEQ ID NO: 391 - DNA, 1329 bp, homo sapiens
gaagcagtagaggagagaaacaaggacggggaaaaaaagaggagcggaaaagagggctgaggaggggaggggaggggaggagaggagggcagaagagaaggaacgagaacaagggaaaatcccccgggaacacagaaagatagagacccaggggactcccgcagagagggcctcttgggcttcagcgcagaggaaagtttcccgggcaccccctctcctcccctgccctccgccgcctgggccctgccctgcgtgcccccaggcccagcgcgcctccgggcgagtccccaggagcgcggcccaatggatcgctccgggcccgccccctcgcgcgctgattggccgccgccccgctggcctcgccttattagcaagttctctggggagccgcggtagggcccggagccggcgagtgctcccgggaactctgcctgcgcggcggcagcgaccggaggccaggcccagcacgccggagctggcctgctggggaggggcgggaggcgcgcgcgggagggtccgcccggccagggccccgggcgctcgcagaggccggccgcgctcccagcccgcccggagcccatgcccggcggctggccagtgctgcggcagaagggggggcccggctctgcatggccccggctgctgacatgacttctttgccactcggtgtcaaagtggaggactccgccttcggcaagccggcggggggaggcgcgggccaggcccccagcgccgccgcggccacggcagccgccatgggcgcggacgaggagggggccaagcccaaagtgtccccttcgctcctgcccttcagcgtggaggcgctcatggccgaccacaggaagccgggggccaaggagagcgccctggcgccctccgagggcgtgcaggcggcgggtggctcggcgcagccactgggcgtcccgccggggtcgctgggagccccggacgcgccctcttcgccgcggccgctcggccatttctcggtggggggactcctcaagctgccagaagatgcgctcgtcaaagccgagagccccgagaagcccgagaggaccccgtggatgcagagcccccgcttctccccgccgccggccagtgagtagccagaacccaggcgcagagggagggggccgggtgggggccgggtggggtgtgggacccgagggctcctggtggcctccggcgcctgcgtacctgcagccggtgctagggagccgtgggctgcaaggccgggtcttgcgcctccctccactcccacccaggaagaaggttccagacctcctcgccttggcccagagacgctgcgggtgggagttaacggatagg

SEQ ID NO: 392 - DNA, 1329 bp, homo sapiens
gaagtagtagaggagagaaataaggacggggaaaaaaagaggagcggaaaagagggttgaggaggggaggggaggggaggagaggagggtagaagagaaggaacgagaataagggaaaatttttcgggaatatagaaagatagagatttaggggattttcgtagagagggttttttgggttttagcgtagaggaaagtttttcgggtattttttttttttttttgtttttcgtcgtttgggttttgttttgcgtgtttttaggtttagcgcgttttcgggcgagtttttaggagcgcggtttaatggatcgtttcgggttcgttttttcgcgcgttgattggtcgtcgtttcgttggtttcgttttattagtaagttttttggggagtcgcggtagggttcggagtcggcgagtgttttcgggaattttgtttgcgcggcggtagcgatcggaggttaggtttagtacgtcggagttggtttgttggggaggggcgggaggcgcgcgcgggagggttcgttcggttagggtttcgggcgttcgtagaggtcggtcgcgtttttagttcgttcggagtttatgttcggcggttggttagtgttgcggtagaagggggggttcggttttgtatggtttcggttgttgatatgatttttttgttattcggtgttaaagtggaggatttcgttttcggtaagtcggcggggggaggcgcgggttaggtttttagcgtcgtcgcggttacggtagtcgttatgggcgcggacgaggagggggttaagtttaaagtgtttttttcgtttttgttttttagcgtggaggcgtttatggtcgattataggaagtcgggggttaaggagagcgttttggcgtttttcgagggcgtgtaggcggcgggtggttcggcgtagttattgggcgtttcgtcggggtcgttgggagtttcggacgcgtttttttcgtcgcggtcgttcggttatttttcggtggggggattttttaagttgttagaagatgcgttcgttaaagtcgagagtttcgagaagttcgagaggatttcgtggatgtagagttttcgttttttttcgtcgtcggttagtgagtagttagaatttaggcgtagagggagggggtcgggtgggggtcgggtggggtgtgggattcgagggtttttggtggttttcggcgtttgcgtatttgtagtcggtgttagggagtcgtgggttgtaaggtcgggttttgcgtttttttttatttttatttaggaagaaggttttagattttttcgttttggtttagagacgttgcgggtgggagttaacggatagg

SEQ ID NO: 393 - DNA, 1329 bp, homo sapiens
gaagtagtagaggagagaaataaggatggggaaaaaaagaggagtggaaaagagggttgaggaggggaggggaggggaggagaggagggtagaagagaaggaatgagaataagggaaaattttttgggaatatagaaagatagagatttaggggatttttgtagagagggttttttgggttttagtgtagaggaaagttttttgggtattttttttttttttttgttttttgttgtttgggttttgttttgtgtgtttttaggtttagtgtgtttttgggtgagtttttaggagtgtggtttaatggattgttttgggtttgtttttttgtgtgttgattggttgttgttttgttggttttgttttattagtaagttttttggggagttgtggtagggtttggagttggtgagtgtttttgggaattttgtttgtgtggtggtagtgattggaggttaggtttagtatgttggagttggtttgttggggaggggtgggaggtgtgtgtgggagggtttgtttggttagggttttgggtgtttgtagaggttggttgtgtttttagtttgtttggagtttatgtttggtggttggttagtgttgtggtagaagggggggtttggttttgtatggttttggttgttgatatgatttttttgttatttggtgttaaagtggaggattttgtttttggtaagttggtggggggaggtgtgggttaggtttttagtgttgttgtggttatggtagttgttatgggtgtggatgaggagggggttaagtttaaagtgttttttttgtttttgttttttagtgtggaggtgtttatggttgattataggaagttgggggttaaggagagtgttttggtgttttttgagggtgtgtaggtggtgggtggtttggtgtagttattgggtgttttgttggggttgttgggagttttggatgtgttttttttgttgtggttgtttggttattttttggtggggggattttttaagttgttagaagatgtgtttgttaaagttgagagttttgagaagtttgagaggattttgtggatgtagagtttttgtttttttttgttgttggttagtgagtagttagaatttaggtgtagagggagggggttgggtgggggttgggtggggtgtgggatttgagggtttttggtggtttttggtgtttgtgtatttgtagttggtgttagggagttgtgggttgtaaggttgggttttgtgtttttttttatttttatttaggaagaaggttttagatttttttgttttggtttagagatgttgtgggtgggagttaatggatagg

SEQ ID NO: 394 - DNA, 1329 bp, homo sapiens
tttattcgttaatttttattcgtagcgtttttgggttaaggcgaggaggtttggaattttttttttgggtgggagtggagggaggcgtaagattcggttttgtagtttacggttttttagtatcggttgtaggtacgtaggcgtcggaggttattaggagttttcgggttttatattttattcggtttttattcggttttttttttttgcgtttgggttttggttatttattggtcggcggcggggagaagcgggggttttgtatttacggggttttttcgggtttttcggggttttcggttttgacgagcgtattttttggtagtttgaggagtttttttatcgagaaatggtcgagcggtcgcggcgaagagggcgcgttcggggtttttagcgatttcggcgggacgtttagtggttgcgtcgagttattcgtcgtttgtacgttttcggagggcgttagggcgttttttttggttttcggttttttgtggtcggttatgagcgtttttacgttgaagggtaggagcgaaggggatattttgggtttggtttttttttcgttcgcgtttatggcggttgtcgtggtcgcggcggcgttgggggtttggttcgcgttttttttcgtcggtttgtcgaaggcggagttttttattttgatatcgagtggtaaagaagttatgttagtagtcggggttatgtagagtcgggtttttttttttgtcgtagtattggttagtcgtcgggtatgggtttcgggcgggttgggagcgcggtcggtttttgcgagcgttcggggttttggtcgggcggattttttcgcgcgcgtttttcgtttttttttagtaggttagtttcggcgtgttgggtttggttttcggtcgttgtcgtcgcgtaggtagagttttcgggagtattcgtcggtttcgggttttatcgcggttttttagagaatttgttaataaggcgaggttagcggggcggcggttaattagcgcgcgagggggcgggttcggagcgatttattgggtcgcgtttttggggattcgttcggaggcgcgttgggtttgggggtacgtagggtagggtttaggcggcggagggtaggggaggagagggggtgttcgggaaatttttttttgcgttgaagtttaagaggttttttttgcgggagttttttgggtttttatttttttgtgttttcgggggatttttttttgttttcgtttttttttttttgtttttttttttttttttttttttttttttttagttttttttttcgttttttttttttttttcgtttttgttttttttttttattgtttt

SEQ ID NO: 395 - DNA, 1329 bp, homo sapiens
tttatttgttaatttttatttgtagtgtttttgggttaaggtgaggaggtttggaattttttttttgggtgggagtggagggaggtgtaagatttggttttgtagtttatggttttttagtattggttgtaggtatgtaggtgttggaggttattaggagtttttgggttttatattttatttggtttttatttggttttttttttttgtgtttgggttttggttatttattggttggtggtggggagaagtgggggttttgtatttatggggtttttttgggttttttggggtttttggttttgatgagtgtattttttggtagtttgaggagtttttttattgagaaatggttgagtggttgtggtgaagagggtgtgtttggggtttttagtgattttggtgggatgtttagtggttgtgttgagttatttgttgtttgtatgtttttggagggtgttagggtgttttttttggtttttggttttttgtggttggttatgagtgtttttatgttgaagggtaggagtgaaggggatattttgggtttggttttttttttgtttgtgtttatggtggttgttgtggttgtggtggtgttgggggtttggtttgtgtttttttttgttggtttgttgaaggtggagttttttattttgatattgagtggtaaagaagttatgttagtagttggggttatgtagagttgggtttttttttttgttgtagtattggttagttgttgggtatgggttttgggtgggttgggagtgtggttggtttttgtgagtgtttggggttttggttgggtggatttttttgtgtgtgttttttgtttttttttagtaggttagttttggtgtgttgggtttggtttttggttgttgttgttgtgtaggtagagtttttgggagtatttgttggttttgggttttattgtggttttttagagaatttgttaataaggtgaggttagtggggtggtggttaattagtgtgtgagggggtgggtttggagtgatttattgggttgtgtttttggggatttgtttggaggtgtgttgggtttgggggtatgtagggtagggtttaggtggtggagggtaggggaggagagggggtgtttgggaaatttttttttgtgttgaagtttaagaggttttttttgtgggagttttttgggtttttatttttttgtgtttttgggggatttttttttgtttttgtttttttttttttgtttttttttttttttttttttttttttttttagtttttttttttgtttttttttttttttttgtttttgttttttttttttattgtttt

SEQ ID NO: 396 - DNA, 50 bp, homo sapiens
ttgtggcatagaatccaaatcaaattctacactttccccggaacacttcg

SEQ ID NO: 397 - DNA, 50 bp, homo sapiens
ttgtggtatagaatttaaattaaattttatatttttttcggaatatttcg

SEQ ID NO: 398 - DNA, 50 bp, homo sapiens
ttgtggtatagaatttaaattaaattttatattttttttggaatattttg

SEQ ID NO: 399 - DNA, 50 bp, homo sapiens
cgaagtgtttcggggaaagtgtagaatttgatttggattttatgttataa

SEQ ID NO: 400 - DNA, 50 bp, homo sapiens
tgaagtgttttggggaaagtgtagaatttgatttggattttatgttataa

SEQ ID NO: 401 - DNA, 3001 bp, homo sapiens
tccaatggaagaagctaggattcatcttcctggctggctagtcttttttttctcttttcttttttttttttttttttttttttttttttttttttgagattgttctcatttccaaaatcgtcagacaccgatttctctgcgcttttcttgcctggtgtcaggacagggaaaagctatgcaggagacatggcctctagctctgttcaactgtcaattctgctggggaccttagataaatctgttaacctctctgccctcagtttccccatctttaactcgagagtgtagatctaaatgctagaagagtactaagggactcttccagccactttttggcagggatcagacttcggagagtgaactcagggagcaaagaggtgaaactggagcagtgtgagggttaaagggaaggcggctggcggtgccgagcaggggagcacgtcgggggtacagcaccagggctggaggaatcggctggcccacaggtgggcgacctgggaccctctatgtcaggtggtacatgctgtagcccacatgggccgtgtagagtcccacgggcgccacaggcagcgcggcgcgctggaaggggccagaggcaccgtagagcgaggcacccgccgcggccgctacagctgcggggccgccgagagggaaggagaggccgaaggcagccggtggcagcatgggcttggcggccatcttcagcttctccagctctgcctcttgtagtctctttgccttggcgcggcggttctggaaccatatcttcacctgcgtctcagtgaggctgagcgagctggagaactccgcgcgctcggcgatggacaggtactgcttctggcggaacttgcgctccagcgccagcagctgcgcggtggtgaagggcgtccgcggcttacggttcgtcttgtgtttgcggagggtgcaggctggggggctcagccgccctgagggccgaaagaaaaaaaaagcaaggggttaagagagaagcattggagcatgatcagcccaagaagtagtaataatagccaaacaataccagatattgagtgccgccaagtgcctcggtgccgggcatcgcgcaaggcacttgaaatatattttctccaattcccattgcaaccccgcaggggagaagttcctgtctactttttgcaaatgaagaaactaagattccaggagaaaaatacccacgttgaaggctcgatgtccacatcttaggcctaaacagctgggaagatgtgaaatcacctttgtgctgcccggcggcttaggaaggccttcatggcgggcctcctcccagggccatccagaggaaaggtggatgttaatacagttgacgaacatgcagaaagaggccctgcgcccagcccaagggcacatttagttttacgcgttggccaaacatttatcagtgcccacggagtgcttcagtgtggggctaggcagttttgtggcatagaatccaaatcaaattctacactttccccggaacacttcgctcctacgggattctaggagtagttcccgcagaccagagatggagcagcgcagaccatcatggagggtgcactgtggccagccctcttagaaacagaaagtgtcatctggagcggagaacgaggggctgctttattctaatgggctttttctttagattgtctcagtcctctgttggatcgcgttcacccctggcgccagggccctctggccccactcaaacgtttgtgtgtgtgtgtgtgtgtgtgtgttgatgttgttgcggggggagtgttgagatcgcctctcccctcaacctgtggcatagtcagcagacatcaacatgcccagctgtctttttcttttggcttcaaaataaacctcaagggtggacagtgaagaagcatcagagcgcaggactagtgcaggtcggggatggggtctgctggggactgcccccggataaaatgtggaacaaattatcccaacacagccgggatcgctttgacttcggggtcttggggcccaaggccctaagcgttggaaaggacactttgcctatgcagcagctttcccggcagaaagtgaattcaaatcgaagatgtttcaccacgcgggttttgcctaagtatgcattttttcacacctctctaaaaaacaaccacaaacaaacagaaaaaacaaaacaaaacaaagaaaacacaacgatcctttggactttcagaccaccaggatgtgagtcaaacgaaatctcgtgttaacaccccgcttcttccctgctggaggccaccgggagtccgggaagcgcttggcccccaactagctttccgccgggccgcccgaggggcgggcgccgagagaaacgtcactcccttcagcggcgacaacccagagcggggccaccttctccggccattaggcttagggagggactggcctttcaaagacgtttaatccccagataaaaatcattcctcagcatcacgccattgaaatctggctgctattatgccgagcaaaataatcggaggaaacgaggaaaacttgggaatttcccgtgctcctgaaatatctccgagcgtgttctctgagtagagcagccagggggccgtgaggccttggagcgaaccgccttgggcacctggagtccactttaatggctcagtcctagacgtttgggagcttcccataggattagcgggggcgccttcccctaattgacttggtgccccgccccctccactggaacctgaatgtccccacccctgaatcatccatccgcccaaagcaccaactatctgcctcaaactcaaagggcatggggaggtagaattctgtaggagcttcggaacctctaggcaaagaggtacttgaaagggaagaggggctgggggacaccagctcctactgcgagaaagtgaaactccgggtgcagggaagataccgcaccacacacattcatccgctggggtgaagccgatgaaacagagtttgggatcagatgagggatcatggacccctg

SEQ ID NO: 402 - DNA, 3001 bp, homo sapiens
tttaatggaagaagttaggatttatttttttggttggttagttttttttttttttttttttttttttttttttttttttttttttttttttttttgagattgtttttatttttaaaatcgttagatatcgatttttttgcgttttttttgtttggtgttaggatagggaaaagttatgtaggagatatggtttttagttttgtttaattgttaattttgttggggattttagataaatttgttaatttttttgtttttagtttttttatttttaattcgagagtgtagatttaaatgttagaagagtattaagggatttttttagttattttttggtagggattagatttcggagagtgaatttagggagtaaagaggtgaaattggagtagtgtgagggttaaagggaaggcggttggcggtgtcgagtaggggagtacgtcgggggtatagtattagggttggaggaatcggttggtttataggtgggcgatttgggattttttatgttaggtggtatatgttgtagtttatatgggtcgtgtagagttttacgggcgttataggtagcgcggcgcgttggaaggggttagaggtatcgtagagcgaggtattcgtcgcggtcgttatagttgcggggtcgtcgagagggaaggagaggtcgaaggtagtcggtggtagtatgggtttggcggttatttttagtttttttagttttgttttttgtagtttttttgttttggcgcggcggttttggaattatatttttatttgcgttttagtgaggttgagcgagttggagaatttcgcgcgttcggcgatggataggtattgtttttggcggaatttgcgttttagcgttagtagttgcgcggtggtgaagggcgttcgcggtttacggttcgttttgtgtttgcggagggtgtaggttggggggtttagtcgttttgagggtcgaaagaaaaaaaaagtaaggggttaagagagaagtattggagtatgattagtttaagaagtagtaataatagttaaataatattagatattgagtgtcgttaagtgtttcggtgtcgggtatcgcgtaaggtatttgaaatatattttttttaatttttattgtaatttcgtaggggagaagtttttgtttattttttgtaaatgaagaaattaagattttaggagaaaaatatttacgttgaaggttcgatgtttatattttaggtttaaatagttgggaagatgtgaaattatttttgtgttgttcggcggtttaggaaggtttttatggcgggtttttttttagggttatttagaggaaaggtggatgttaatatagttgacgaatatgtagaaagaggttttgcgtttagtttaagggtatatttagttttacgcgttggttaaatatttattagtgtttacggagtgttttagtgtggggttaggtagttttgtggtatagaatttaaattaaattttatatttttttcggaatatttcgtttttacgggattttaggagtagttttcgtagattagagatggagtagcgtagattattatggagggtgtattgtggttagtttttttagaaatagaaagtgttatttggagcggagaacgaggggttgttttattttaatgggttttttttttagattgttttagttttttgttggatcgcgtttatttttggcgttagggttttttggttttatttaaacgtttgtgtgtgtgtgtgtgtgtgtgtgttgatgttgttgcggggggagtgttgagatcgtttttttttttaatttgtggtatagttagtagatattaatatgtttagttgttttttttttttggttttaaaataaattttaagggtggatagtgaagaagtattagagcgtaggattagtgtaggtcggggatggggtttgttggggattgttttcggataaaatgtggaataaattattttaatatagtcgggatcgttttgatttcggggttttggggtttaaggttttaagcgttggaaaggatattttgtttatgtagtagttttttcggtagaaagtgaatttaaatcgaagatgttttattacgcgggttttgtttaagtatgtatttttttatatttttttaaaaaataattataaataaatagaaaaaataaaataaaataaagaaaatataacgattttttggatttttagattattaggatgtgagttaaacgaaatttcgtgttaatatttcgttttttttttgttggaggttatcgggagttcgggaagcgtttggtttttaattagtttttcgtcgggtcgttcgaggggcgggcgtcgagagaaacgttattttttttagcggcgataatttagagcggggttatttttttcggttattaggtttagggagggattggttttttaaagacgtttaatttttagataaaaattattttttagtattacgttattgaaatttggttgttattatgtcgagtaaaataatcggaggaaacgaggaaaatttgggaatttttcgtgtttttgaaatattttcgagcgtgttttttgagtagagtagttagggggtcgtgaggttttggagcgaatcgttttgggtatttggagtttattttaatggtttagttttagacgtttgggagttttttataggattagcgggggcgtttttttttaattgatttggtgtttcgttttttttattggaatttgaatgtttttatttttgaattatttattcgtttaaagtattaattatttgttttaaatttaaagggtatggggaggtagaattttgtaggagtttcggaatttttaggtaaagaggtatttgaaagggaagaggggttgggggatattagtttttattgcgagaaagtgaaatttcgggtgtagggaagatatcgtattatatatatttattcgttggggtgaagtcgatgaaatagagtttgggattagatgagggattatggatttttg

SEQ ID NO: 403 - DNA, 3001 bp, homo sapiens
tttaatggaagaagttaggatttatttttttggttggttagttttttttttttttttttttttttttttttttttttttttttttttttttttttgagattgtttttatttttaaaattgttagatattgatttttttgtgttttttttgtttggtgttaggatagggaaaagttatgtaggagatatggtttttagttttgtttaattgttaattttgttggggattttagataaatttgttaatttttttgtttttagtttttttatttttaatttgagagtgtagatttaaatgttagaagagtattaagggatttttttagttattttttggtagggattagattttggagagtgaatttagggagtaaagaggtgaaattggagtagtgtgagggttaaagggaaggtggttggtggtgttgagtaggggagtatgttgggggtatagtattagggttggaggaattggttggtttataggtgggtgatttgggattttttatgttaggtggtatatgttgtagtttatatgggttgtgtagagttttatgggtgttataggtagtgtggtgtgttggaaggggttagaggtattgtagagtgaggtatttgttgtggttgttatagttgtggggttgttgagagggaaggagaggttgaaggtagttggtggtagtatgggtttggtggttatttttagtttttttagttttgttttttgtagtttttttgttttggtgtggtggttttggaattatatttttatttgtgttttagtgaggttgagtgagttggagaattttgtgtgtttggtgatggataggtattgtttttggtggaatttgtgttttagtgttagtagttgtgtggtggtgaagggtgtttgtggtttatggtttgttttgtgtttgtggagggtgtaggttggggggtttagttgttttgagggttgaaagaaaaaaaaagtaaggggttaagagagaagtattggagtatgattagtttaagaagtagtaataatagttaaataatattagatattgagtgttgttaagtgttttggtgttgggtattgtgtaaggtatttgaaatatattttttttaatttttattgtaattttgtaggggagaagtttttgtttattttttgtaaatgaagaaattaagattttaggagaaaaatatttatgttgaaggtttgatgtttatattttaggtttaaatagttgggaagatgtgaaattatttttgtgttgtttggtggtttaggaaggtttttatggtgggtttttttttagggttatttagaggaaaggtggatgttaatatagttgatgaatatgtagaaagaggttttgtgtttagtttaagggtatatttagttttatgtgttggttaaatatttattagtgtttatggagtgttttagtgtggggttaggtagttttgtggtatagaatttaaattaaattttatattttttttggaatattttgtttttatgggattttaggagtagtttttgtagattagagatggagtagtgtagattattatggagggtgtattgtggttagtttttttagaaatagaaagtgttatttggagtggagaatgaggggttgttttattttaatgggttttttttttagattgttttagttttttgttggattgtgtttatttttggtgttagggttttttggttttatttaaatgtttgtgtgtgtgtgtgtgtgtgtgtgttgatgttgttgtggggggagtgttgagattgtttttttttttaatttgtggtatagttagtagatattaatatgtttagttgttttttttttttggttttaaaataaattttaagggtggatagtgaagaagtattagagtgtaggattagtgtaggttggggatggggtttgttggggattgtttttggataaaatgtggaataaattattttaatatagttgggattgttttgattttggggttttggggtttaaggttttaagtgttggaaaggatattttgtttatgtagtagtttttttggtagaaagtgaatttaaattgaagatgttttattatgtgggttttgtttaagtatgtatttttttatatttttttaaaaaataattataaataaatagaaaaaataaaataaaataaagaaaatataatgattttttggatttttagattattaggatgtgagttaaatgaaattttgtgttaatattttgttttttttttgttggaggttattgggagtttgggaagtgtttggtttttaattagttttttgttgggttgtttgaggggtgggtgttgagagaaatgttattttttttagtggtgataatttagagtggggttattttttttggttattaggtttagggagggattggttttttaaagatgtttaatttttagataaaaattattttttagtattatgttattgaaatttggttgttattatgttgagtaaaataattggaggaaatgaggaaaatttgggaattttttgtgtttttgaaatatttttgagtgtgttttttgagtagagtagttagggggttgtgaggttttggagtgaattgttttgggtatttggagtttattttaatggtttagttttagatgtttgggagttttttataggattagtgggggtgtttttttttaattgatttggtgttttgttttttttattggaatttgaatgtttttatttttgaattatttatttgtttaaagtattaattatttgttttaaatttaaagggtatggggaggtagaattttgtaggagttttggaatttttaggtaaagaggtatttgaaagggaagaggggttgggggatattagtttttattgtgagaaagtgaaattttgggtgtagggaagatattgtattatatatatttatttgttggggtgaagttgatgaaatagagtttgggattagatgagggattatggatttttg

SEQ ID NO: 404 - DNA, 3001 bp, homo sapiens
taggggtttatgattttttatttgattttaaattttgttttatcggttttattttagcggatgaatgtgtgtggtgcggtattttttttgtattcggagttttattttttcgtagtaggagttggtgttttttagtttttttttttttttaagtatttttttgtttagaggtttcgaagtttttatagaattttatttttttatgttttttgagtttgaggtagatagttggtgttttgggcggatggatgatttaggggtggggatatttaggttttagtggagggggcggggtattaagttaattaggggaaggcgttttcgttaattttatgggaagtttttaaacgtttaggattgagttattaaagtggattttaggtgtttaaggcggttcgttttaaggttttacggttttttggttgttttatttagagaatacgttcggagatattttaggagtacgggaaatttttaagtttttttcgtttttttcgattattttgttcggtataatagtagttagattttaatggcgtgatgttgaggaatgatttttatttggggattaaacgtttttgaaaggttagtttttttttaagtttaatggtcggagaaggtggtttcgttttgggttgtcgtcgttgaagggagtgacgtttttttcggcgttcgtttttcgggcggttcggcggaaagttagttgggggttaagcgtttttcggattttcggtggtttttagtagggaagaagcggggtgttaatacgagatttcgtttgatttatattttggtggtttgaaagtttaaaggatcgttgtgttttttttgttttgttttgttttttttgtttgtttgtggttgttttttagagaggtgtgaaaaaatgtatatttaggtaaaattcgcgtggtgaaatattttcgatttgaatttattttttgtcgggaaagttgttgtataggtaaagtgttttttttaacgtttagggttttgggttttaagatttcgaagttaaagcgatttcggttgtgttgggataatttgttttatattttattcgggggtagtttttagtagattttattttcgatttgtattagttttgcgttttgatgtttttttattgtttatttttgaggtttattttgaagttaaaagaaaaagatagttgggtatgttgatgtttgttgattatgttataggttgaggggagaggcgattttaatatttttttcgtaataatattaatatatatatatatatatatatataaacgtttgagtggggttagagggttttggcgttaggggtgaacgcgatttaatagaggattgagataatttaaagaaaaagtttattagaataaagtagtttttcgtttttcgttttagatgatattttttgtttttaagagggttggttatagtgtattttttatgatggtttgcgttgttttatttttggtttgcgggaattatttttagaatttcgtaggagcgaagtgtttcggggaaagtgtagaatttgatttggattttatgttataaaattgtttagttttatattgaagtatttcgtgggtattgataaatgtttggttaacgcgtaaaattaaatgtgtttttgggttgggcgtagggtttttttttgtatgttcgttaattgtattaatatttattttttttttggatggttttgggaggaggttcgttatgaaggtttttttaagtcgtcgggtagtataaaggtgattttatatttttttagttgtttaggtttaagatgtggatatcgagtttttaacgtgggtattttttttttggaattttagtttttttatttgtaaaaagtagataggaattttttttttgcggggttgtaatgggaattggagaaaatatattttaagtgttttgcgcgatgttcggtatcgaggtatttggcggtatttaatatttggtattgtttggttattattattattttttgggttgattatgttttaatgttttttttttaattttttgttttttttttttttcggtttttagggcggttgagttttttagtttgtatttttcgtaaatataagacgaatcgtaagtcgcggacgttttttattatcgcgtagttgttggcgttggagcgtaagtttcgttagaagtagtatttgtttatcgtcgagcgcgcggagttttttagttcgtttagttttattgagacgtaggtgaagatatggttttagaatcgtcgcgttaaggtaaagagattataagaggtagagttggagaagttgaagatggtcgttaagtttatgttgttatcggttgttttcggtttttttttttttttcggcggtttcgtagttgtagcggtcgcggcgggtgtttcgttttacggtgtttttggttttttttagcgcgtcgcgttgtttgtggcgttcgtgggattttatacggtttatgtgggttatagtatgtattatttgatatagagggttttaggtcgtttatttgtgggttagtcgatttttttagttttggtgttgtattttcgacgtgtttttttgttcggtatcgttagtcgttttttttttaatttttatattgttttagttttatttttttgttttttgagtttatttttcgaagtttgatttttgttaaaaagtggttggaagagttttttagtatttttttagtatttagatttatattttcgagttaaagatggggaaattgagggtagagaggttaatagatttatttaaggtttttagtagaattgatagttgaatagagttagaggttatgttttttgtatagtttttttttgttttgatattaggtaagaaaagcgtagagaaatcggtgtttgacgattttggaaatgagaataattttaaaaaaaaaaaaaaaaaaaaaaaaaaaaaaaaaaaagaaaagagaaaaaaaagattagttagttaggaagatgaattttagttttttttattgga

SEQ ID NO: 405 - DNA, 3001 bp, homo sapiens
taggggtttatgattttttatttgattttaaattttgttttattggttttattttagtggatgaatgtgtgtggtgtggtattttttttgtatttggagttttatttttttgtagtaggagttggtgttttttagtttttttttttttttaagtatttttttgtttagaggttttgaagtttttatagaattttatttttttatgttttttgagtttgaggtagatagttggtgttttgggtggatggatgatttaggggtggggatatttaggttttagtggagggggtggggtattaagttaattaggggaaggtgtttttgttaattttatgggaagtttttaaatgtttaggattgagttattaaagtggattttaggtgtttaaggtggtttgttttaaggttttatggttttttggttgttttatttagagaatatgtttggagatattttaggagtatgggaaatttttaagttttttttgttttttttgattattttgtttggtataatagtagttagattttaatggtgtgatgttgaggaatgatttttatttggggattaaatgtttttgaaaggttagtttttttttaagtttaatggttggagaaggtggttttgttttgggttgttgttgttgaagggagtgatgttttttttggtgtttgttttttgggtggtttggtggaaagttagttgggggttaagtgttttttggatttttggtggtttttagtagggaagaagtggggtgttaatatgagattttgtttgatttatattttggtggtttgaaagtttaaaggattgttgtgttttttttgttttgttttgttttttttgtttgtttgtggttgttttttagagaggtgtgaaaaaatgtatatttaggtaaaatttgtgtggtgaaatatttttgatttgaatttattttttgttgggaaagttgttgtataggtaaagtgttttttttaatgtttagggttttgggttttaagattttgaagttaaagtgattttggttgtgttgggataatttgttttatattttatttgggggtagtttttagtagattttatttttgatttgtattagttttgtgttttgatgtttttttattgtttatttttgaggtttattttgaagttaaaagaaaaagatagttgggtatgttgatgtttgttgattatgttataggttgaggggagaggtgattttaatattttttttgtaataatattaatatatatatatatatatatatataaatgtttgagtggggttagagggttttggtgttaggggtgaatgtgatttaatagaggattgagataatttaaagaaaaagtttattagaataaagtagttttttgttttttgttttagatgatattttttgtttttaagagggttggttatagtgtattttttatgatggtttgtgttgttttatttttggtttgtgggaattatttttagaattttgtaggagtgaagtgttttggggaaagtgtagaatttgatttggattttatgttataaaattgtttagttttatattgaagtattttgtgggtattgataaatgtttggttaatgtgtaaaattaaatgtgtttttgggttgggtgtagggtttttttttgtatgtttgttaattgtattaatatttattttttttttggatggttttgggaggaggtttgttatgaaggtttttttaagttgttgggtagtataaaggtgattttatatttttttagttgtttaggtttaagatgtggatattgagtttttaatgtgggtattttttttttggaattttagtttttttatttgtaaaaagtagataggaattttttttttgtggggttgtaatgggaattggagaaaatatattttaagtgttttgtgtgatgtttggtattgaggtatttggtggtatttaatatttggtattgtttggttattattattattttttgggttgattatgttttaatgttttttttttaattttttgtttttttttttttttggtttttagggtggttgagttttttagtttgtattttttgtaaatataagatgaattgtaagttgtggatgttttttattattgtgtagttgttggtgttggagtgtaagttttgttagaagtagtatttgtttattgttgagtgtgtggagttttttagtttgtttagttttattgagatgtaggtgaagatatggttttagaattgttgtgttaaggtaaagagattataagaggtagagttggagaagttgaagatggttgttaagtttatgttgttattggttgtttttggttttttttttttttttggtggttttgtagttgtagtggttgtggtgggtgttttgttttatggtgtttttggttttttttagtgtgttgtgttgtttgtggtgtttgtgggattttatatggtttatgtgggttatagtatgtattatttgatatagagggttttaggttgtttatttgtgggttagttgatttttttagttttggtgttgtatttttgatgtgtttttttgtttggtattgttagttgttttttttttaatttttatattgttttagttttatttttttgttttttgagtttattttttgaagtttgatttttgttaaaaagtggttggaagagttttttagtatttttttagtatttagatttatatttttgagttaaagatggggaaattgagggtagagaggttaatagatttatttaaggtttttagtagaattgatagttgaatagagttagaggttatgttttttgtatagtttttttttgttttgatattaggtaagaaaagtgtagagaaattggtgtttgatgattttggaaatgagaataattttaaaaaaaaaaaaaaaaaaaaaaaaaaaaaaaaaaaagaaaagagaaaaaaaagattagttagttaggaagatgaattttagttttttttattgga

SEQ ID NO: 406 - DNA, 50 bp, homo sapiens
ttacggttcgtcttgtgtttgcggagggtgcaggctggggggctcagccg

SEQ ID NO: 407 - DNA, 50 bp, homo sapiens
ttacggttcgttttgtgtttgcggagggtgtaggttggggggtttagtcg

SEQ ID NO: 408 - DNA, 50 bp, homo sapiens
ttatggtttgttttgtgtttgtggagggtgtaggttggggggtttagttg

SEQ ID NO: 409 - DNA, 50 bp, homo sapiens
cggttgagttttttagtttgtatttttcgtaaatataagacgaatcgtaa

SEQ ID NO: 410 - DNA, 50 bp, homo sapiens
tggttgagttttttagtttgtattttttgtaaatataagatgaattgtaa

SEQ ID NO: 411 - DNA, 3001 bp, homo sapiens
cccgagtaagtgtcgatttcagcttaaagtgaattggaaaattgagcctaattatcctaggtaattacttcaactctccacttgactttcctaatgcagatctgtcgtgggtgttcaaaaagacacccccctctatccctgcataccctgttatcacctttcaaagttgctgtcgtaaaagtaccgtcaaactgaaaagcaactgtacacataaagagatagcaagaagcaaaattaaaataaaagactcaatcagtaaagagataatttttgtagcttaaaattaatttatttaacaaatatagctataatataaatgataataaaatttcaaatatacagtatattacatagtacacacaatcccttccaaagggatgtttgagagccacacaaatgtactgttaaatagaaagagtttttttttttttttaattttacaattgtgtttctggtactggtaagagagaggtcccttcaacctacctttgcaacacatctgtgttttccctgccccccagagcaaatgttttgttgttgaacttgtcttaaattttccaatggaagaagctaggattcatcttcctggctggctagtcttttttttctcttttcttttttttttttttttttttttttttttttttttttgagattgttctcatttccaaaatcgtcagacaccgatttctctgcgcttttcttgcctggtgtcaggacagggaaaagctatgcaggagacatggcctctagctctgttcaactgtcaattctgctggggaccttagataaatctgttaacctctctgccctcagtttccccatctttaactcgagagtgtagatctaaatgctagaagagtactaagggactcttccagccactttttggcagggatcagacttcggagagtgaactcagggagcaaagaggtgaaactggagcagtgtgagggttaaagggaaggcggctggcggtgccgagcaggggagcacgtcgggggtacagcaccagggctggaggaatcggctggcccacaggtgggcgacctgggaccctctatgtcaggtggtacatgctgtagcccacatgggccgtgtagagtcccacgggcgccacaggcagcgcggcgcgctggaaggggccagaggcaccgtagagcgaggcacccgccgcggccgctacagctgcggggccgccgagagggaaggagaggccgaaggcagccggtggcagcatgggcttggcggccatcttcagcttctccagctctgcctcttgtagtctctttgccttggcgcggcggttctggaaccatatcttcacctgcgtctcagtgaggctgagcgagctggagaactccgcgcgctcggcgatggacaggtactgcttctggcggaacttgcgctccagcgccagcagctgcgcggtggtgaagggcgtccgcggcttacggttcgtcttgtgtttgcggagggtgcaggctggggggctcagccgccctgagggccgaaagaaaaaaaaagcaaggggttaagagagaagcattggagcatgatcagcccaagaagtagtaataatagccaaacaataccagatattgagtgccgccaagtgcctcggtgccgggcatcgcgcaaggcacttgaaatatattttctccaattcccattgcaaccccgcaggggagaagttcctgtctactttttgcaaatgaagaaactaagattccaggagaaaaatacccacgttgaaggctcgatgtccacatcttaggcctaaacagctgggaagatgtgaaatcacctttgtgctgcccggcggcttaggaaggccttcatggcgggcctcctcccagggccatccagaggaaaggtggatgttaatacagttgacgaacatgcagaaagaggccctgcgcccagcccaagggcacatttagttttacgcgttggccaaacatttatcagtgcccacggagtgcttcagtgtggggctaggcagttttgtggcatagaatccaaatcaaattctacactttccccggaacacttcgctcctacgggattctaggagtagttcccgcagaccagagatggagcagcgcagaccatcatggagggtgcactgtggccagccctcttagaaacagaaagtgtcatctggagcggagaacgaggggctgctttattctaatgggctttttctttagattgtctcagtcctctgttggatcgcgttcacccctggcgccagggccctctggccccactcaaacgtttgtgtgtgtgtgtgtgtgtgtgtgttgatgttgttgcggggggagtgttgagatcgcctctcccctcaacctgtggcatagtcagcagacatcaacatgcccagctgtctttttcttttggcttcaaaataaacctcaagggtggacagtgaagaagcatcagagcgcaggactagtgcaggtcggggatggggtctgctggggactgcccccggataaaatgtggaacaaattatcccaacacagccgggatcgctttgacttcggggtcttggggcccaaggccctaagcgttggaaaggacactttgcctatgcagcagctttcccggcagaaagtgaattcaaatcgaagatgtttcaccacgcgggttttgcctaagtatgcattttttcacacctctctaaaaaacaaccacaaacaaacagaaaaaacaaaacaaaacaaagaaaacacaacgatcctttggactttcagaccaccaggatgtgagtcaaacgaaatctcgtgttaacaccccgcttcttccctgctggaggccaccgggagtccgggaagcgcttggcccccaactagctttccgccgggccgcccgaggggcgggcgccgagagaaacgtcactcccttcagcggcgacaacccagagcggggccaccttctccggccattaggcttagggagggactggcctttcaaagacgtttaatccccagataaa

SEQ ID NO: 412 - DNA, 3001 bp, homo sapiens
ttcgagtaagtgtcgattttagtttaaagtgaattggaaaattgagtttaattattttaggtaattattttaattttttatttgatttttttaatgtagatttgtcgtgggtgtttaaaaagatatttttttttatttttgtatattttgttattattttttaaagttgttgtcgtaaaagtatcgttaaattgaaaagtaattgtatatataaagagatagtaagaagtaaaattaaaataaaagatttaattagtaaagagataatttttgtagtttaaaattaatttatttaataaatatagttataatataaatgataataaaattttaaatatatagtatattatatagtatatataattttttttaaagggatgtttgagagttatataaatgtattgttaaatagaaagagtttttttttttttttaattttataattgtgtttttggtattggtaagagagaggtttttttaatttatttttgtaatatatttgtgttttttttgttttttagagtaaatgttttgttgttgaatttgttttaaattttttaatggaagaagttaggatttatttttttggttggttagttttttttttttttttttttttttttttttttttttttttttttttttttttttgagattgtttttatttttaaaatcgttagatatcgatttttttgcgttttttttgtttggtgttaggatagggaaaagttatgtaggagatatggtttttagttttgtttaattgttaattttgttggggattttagataaatttgttaatttttttgtttttagtttttttatttttaattcgagagtgtagatttaaatgttagaagagtattaagggatttttttagttattttttggtagggattagatttcggagagtgaatttagggagtaaagaggtgaaattggagtagtgtgagggttaaagggaaggcggttggcggtgtcgagtaggggagtacgtcgggggtatagtattagggttggaggaatcggttggtttataggtgggcgatttgggattttttatgttaggtggtatatgttgtagtttatatgggtcgtgtagagttttacgggcgttataggtagcgcggcgcgttggaaggggttagaggtatcgtagagcgaggtattcgtcgcggtcgttatagttgcggggtcgtcgagagggaaggagaggtcgaaggtagtcggtggtagtatgggtttggcggttatttttagtttttttagttttgttttttgtagtttttttgttttggcgcggcggttttggaattatatttttatttgcgttttagtgaggttgagcgagttggagaatttcgcgcgttcggcgatggataggtattgtttttggcggaatttgcgttttagcgttagtagttgcgcggtggtgaagggcgttcgcggtttacggttcgttttgtgtttgcggagggtgtaggttggggggtttagtcgttttgagggtcgaaagaaaaaaaaagtaaggggttaagagagaagtattggagtatgattagtttaagaagtagtaataatagttaaataatattagatattgagtgtcgttaagtgtttcggtgtcgggtatcgcgtaaggtatttgaaatatattttttttaatttttattgtaatttcgtaggggagaagtttttgtttattttttgtaaatgaagaaattaagattttaggagaaaaatatttacgttgaaggttcgatgtttatattttaggtttaaatagttgggaagatgtgaaattatttttgtgttgttcggcggtttaggaaggtttttatggcgggtttttttttagggttatttagaggaaaggtggatgttaatatagttgacgaatatgtagaaagaggttttgcgtttagtttaagggtatatttagttttacgcgttggttaaatatttattagtgtttacggagtgttttagtgtggggttaggtagttttgtggtatagaatttaaattaaattttatatttttttcggaatatttcgtttttacgggattttaggagtagttttcgtagattagagatggagtagcgtagattattatggagggtgtattgtggttagtttttttagaaatagaaagtgttatttggagcggagaacgaggggttgttttattttaatgggttttttttttagattgttttagttttttgttggatcgcgtttatttttggcgttagggttttttggttttatttaaacgtttgtgtgtgtgtgtgtgtgtgtgtgttgatgttgttgcggggggagtgttgagatcgtttttttttttaatttgtggtatagttagtagatattaatatgtttagttgttttttttttttggttttaaaataaattttaagggtggatagtgaagaagtattagagcgtaggattagtgtaggtcggggatggggtttgttggggattgttttcggataaaatgtggaataaattattttaatatagtcgggatcgttttgatttcggggttttggggtttaaggttttaagcgttggaaaggatattttgtttatgtagtagttttttcggtagaaagtgaatttaaatcgaagatgttttattacgcgggttttgtttaagtatgtatttttttatatttttttaaaaaataattataaataaatagaaaaaataaaataaaataaagaaaatataacgattttttggatttttagattattaggatgtgagttaaacgaaatttcgtgttaatatttcgttttttttttgttggaggttatcgggagttcgggaagcgtttggtttttaattagtttttcgtcgggtcgttcgaggggcgggcgtcgagagaaacgttattttttttagcggcgataatttagagcggggttatttttttcggttattaggtttagggagggattggttttttaaagacgtttaatttttagataaa

SEQ ID NO: 413 - DNA, 3001 bp, homo sapiens
tttgagtaagtgttgattttagtttaaagtgaattggaaaattgagtttaattattttaggtaattattttaattttttatttgatttttttaatgtagatttgttgtgggtgtttaaaaagatatttttttttatttttgtatattttgttattattttttaaagttgttgttgtaaaagtattgttaaattgaaaagtaattgtatatataaagagatagtaagaagtaaaattaaaataaaagatttaattagtaaagagataatttttgtagtttaaaattaatttatttaataaatatagttataatataaatgataataaaattttaaatatatagtatattatatagtatatataattttttttaaagggatgtttgagagttatataaatgtattgttaaatagaaagagtttttttttttttttaattttataattgtgtttttggtattggtaagagagaggtttttttaatttatttttgtaatatatttgtgttttttttgttttttagagtaaatgttttgttgttgaatttgttttaaattttttaatggaagaagttaggatttatttttttggttggttagttttttttttttttttttttttttttttttttttttttttttttttttttttttgagattgtttttatttttaaaattgttagatattgatttttttgtgttttttttgtttggtgttaggatagggaaaagttatgtaggagatatggtttttagttttgtttaattgttaattttgttggggattttagataaatttgttaatttttttgtttttagtttttttatttttaatttgagagtgtagatttaaatgttagaagagtattaagggatttttttagttattttttggtagggattagattttggagagtgaatttagggagtaaagaggtgaaattggagtagtgtgagggttaaagggaaggtggttggtggtgttgagtaggggagtatgttgggggtatagtattagggttggaggaattggttggtttataggtgggtgatttgggattttttatgttaggtggtatatgttgtagtttatatgggttgtgtagagttttatgggtgttataggtagtgtggtgtgttggaaggggttagaggtattgtagagtgaggtatttgttgtggttgttatagttgtggggttgttgagagggaaggagaggttgaaggtagttggtggtagtatgggtttggtggttatttttagtttttttagttttgttttttgtagtttttttgttttggtgtggtggttttggaattatatttttatttgtgttttagtgaggttgagtgagttggagaattttgtgtgtttggtgatggataggtattgtttttggtggaatttgtgttttagtgttagtagttgtgtggtggtgaagggtgtttgtggtttatggtttgttttgtgtttgtggagggtgtaggttggggggtttagttgttttgagggttgaaagaaaaaaaaagtaaggggttaagagagaagtattggagtatgattagtttaagaagtagtaataatagttaaataatattagatattgagtgttgttaagtgttttggtgttgggtattgtgtaaggtatttgaaatatattttttttaatttttattgtaattttgtaggggagaagtttttgtttattttttgtaaatgaagaaattaagattttaggagaaaaatatttatgttgaaggtttgatgtttatattttaggtttaaatagttgggaagatgtgaaattatttttgtgttgtttggtggtttaggaaggtttttatggtgggtttttttttagggttatttagaggaaaggtggatgttaatatagttgatgaatatgtagaaagaggttttgtgtttagtttaagggtatatttagttttatgtgttggttaaatatttattagtgtttatggagtgttttagtgtggggttaggtagttttgtggtatagaatttaaattaaattttatattttttttggaatattttgtttttatgggattttaggagtagtttttgtagattagagatggagtagtgtagattattatggagggtgtattgtggttagtttttttagaaatagaaagtgttatttggagtggagaatgaggggttgttttattttaatgggttttttttttagattgttttagttttttgttggattgtgtttatttttggtgttagggttttttggttttatttaaatgtttgtgtgtgtgtgtgtgtgtgtgtgttgatgttgttgtggggggagtgttgagattgtttttttttttaatttgtggtatagttagtagatattaatatgtttagttgttttttttttttggttttaaaataaattttaagggtggatagtgaagaagtattagagtgtaggattagtgtaggttggggatggggtttgttggggattgtttttggataaaatgtggaataaattattttaatatagttgggattgttttgattttggggttttggggtttaaggttttaagtgttggaaaggatattttgtttatgtagtagtttttttggtagaaagtgaatttaaattgaagatgttttattatgtgggttttgtttaagtatgtatttttttatatttttttaaaaaataattataaataaatagaaaaaataaaataaaataaagaaaatataatgattttttggatttttagattattaggatgtgagttaaatgaaattttgtgttaatattttgttttttttttgttggaggttattgggagtttgggaagtgtttggtttttaattagttttttgttgggttgtttgaggggtgggtgttgagagaaatgttattttttttagtggtgataatttagagtggggttattttttttggttattaggtttagggagggattggttttttaaagatgtttaatttttagataaa

SEQ ID NO: 414 - DNA, 3001 bp, homo sapiens
tttatttggggattaaacgtttttgaaaggttagtttttttttaagtttaatggtcggagaaggtggtttcgttttgggttgtcgtcgttgaagggagtgacgtttttttcggcgttcgtttttcgggcggttcggcggaaagttagttgggggttaagcgtttttcggattttcggtggtttttagtagggaagaagcggggtgttaatacgagatttcgtttgatttatattttggtggtttgaaagtttaaaggatcgttgtgttttttttgttttgttttgttttttttgtttgtttgtggttgttttttagagaggtgtgaaaaaatgtatatttaggtaaaattcgcgtggtgaaatattttcgatttgaatttattttttgtcgggaaagttgttgtataggtaaagtgttttttttaacgtttagggttttgggttttaagatttcgaagttaaagcgatttcggttgtgttgggataatttgttttatattttattcgggggtagtttttagtagattttattttcgatttgtattagttttgcgttttgatgtttttttattgtttatttttgaggtttattttgaagttaaaagaaaaagatagttgggtatgttgatgtttgttgattatgttataggttgaggggagaggcgattttaatatttttttcgtaataatattaatatatatatatatatatatatataaacgtttgagtggggttagagggttttggcgttaggggtgaacgcgatttaatagaggattgagataatttaaagaaaaagtttattagaataaagtagtttttcgtttttcgttttagatgatattttttgtttttaagagggttggttatagtgtattttttatgatggtttgcgttgttttatttttggtttgcgggaattatttttagaatttcgtaggagcgaagtgtttcggggaaagtgtagaatttgatttggattttatgttataaaattgtttagttttatattgaagtatttcgtgggtattgataaatgtttggttaacgcgtaaaattaaatgtgtttttgggttgggcgtagggtttttttttgtatgttcgttaattgtattaatatttattttttttttggatggttttgggaggaggttcgttatgaaggtttttttaagtcgtcgggtagtataaaggtgattttatatttttttagttgtttaggtttaagatgtggatatcgagtttttaacgtgggtattttttttttggaattttagtttttttatttgtaaaaagtagataggaattttttttttgcggggttgtaatgggaattggagaaaatatattttaagtgttttgcgcgatgttcggtatcgaggtatttggcggtatttaatatttggtattgtttggttattattattattttttgggttgattatgttttaatgttttttttttaattttttgttttttttttttttcggtttttagggcggttgagttttttagtttgtatttttcgtaaatataagacgaatcgtaagtcgcggacgttttttattatcgcgtagttgttggcgttggagcgtaagtttcgttagaagtagtatttgtttatcgtcgagcgcgcggagttttttagttcgtttagttttattgagacgtaggtgaagatatggttttagaatcgtcgcgttaaggtaaagagattataagaggtagagttggagaagttgaagatggtcgttaagtttatgttgttatcggttgttttcggtttttttttttttttcggcggtttcgtagttgtagcggtcgcggcgggtgtttcgttttacggtgtttttggttttttttagcgcgtcgcgttgtttgtggcgttcgtgggattttatacggtttatgtgggttatagtatgtattatttgatatagagggttttaggtcgtttatttgtgggttagtcgatttttttagttttggtgttgtattttcgacgtgtttttttgttcggtatcgttagtcgttttttttttaatttttatattgttttagttttatttttttgttttttgagtttatttttcgaagtttgatttttgttaaaaagtggttggaagagttttttagtatttttttagtatttagatttatattttcgagttaaagatggggaaattgagggtagagaggttaatagatttatttaaggtttttagtagaattgatagttgaatagagttagaggttatgttttttgtatagtttttttttgttttgatattaggtaagaaaagcgtagagaaatcggtgtttgacgattttggaaatgagaataattttaaaaaaaaaaaaaaaaaaaaaaaaaaaaaaaaaaaagaaaagagaaaaaaaagattagttagttaggaagatgaattttagttttttttattggaaaatttaagataagtttaataataaaatatttgttttggggggtagggaaaatatagatgtgttgtaaaggtaggttgaagggattttttttttattagtattagaaatataattgtaaaattaaaaaaaaaaaaaaattttttttatttaatagtatatttgtgtggtttttaaatatttttttggaagggattgtgtgtattatgtaatatattgtatatttgaaattttattattatttatattatagttatatttgttaaataaattaattttaagttataaaaattatttttttattgattgagttttttattttaattttgttttttgttatttttttatgtgtatagttgttttttagtttgacggtatttttacgatagtaattttgaaaggtgataatagggtatgtagggatagaggggggtgtttttttgaatatttacgatagatttgtattaggaaagttaagtggagagttgaagtaattatttaggataattaggtttaattttttaatttattttaagttgaaatcgatatttattcggg

SEQ ID NO: 415 - DNA, 3001 bp, homo sapiens
tttatttggggattaaatgtttttgaaaggttagtttttttttaagtttaatggttggagaaggtggttttgttttgggttgttgttgttgaagggagtgatgttttttttggtgtttgttttttgggtggtttggtggaaagttagttgggggttaagtgttttttggatttttggtggtttttagtagggaagaagtggggtgttaatatgagattttgtttgatttatattttggtggtttgaaagtttaaaggattgttgtgttttttttgttttgttttgttttttttgtttgtttgtggttgttttttagagaggtgtgaaaaaatgtatatttaggtaaaatttgtgtggtgaaatatttttgatttgaatttattttttgttgggaaagttgttgtataggtaaagtgttttttttaatgtttagggttttgggttttaagattttgaagttaaagtgattttggttgtgttgggataatttgttttatattttatttgggggtagtttttagtagattttatttttgatttgtattagttttgtgttttgatgtttttttattgtttatttttgaggtttattttgaagttaaaagaaaaagatagttgggtatgttgatgtttgttgattatgttataggttgaggggagaggtgattttaatattttttttgtaataatattaatatatatatatatatatatatataaatgtttgagtggggttagagggttttggtgttaggggtgaatgtgatttaatagaggattgagataatttaaagaaaaagtttattagaataaagtagttttttgttttttgttttagatgatattttttgtttttaagagggttggttatagtgtattttttatgatggtttgtgttgttttatttttggtttgtgggaattatttttagaattttgtaggagtgaagtgttttggggaaagtgtagaatttgatttggattttatgttataaaattgtttagttttatattgaagtattttgtgggtattgataaatgtttggttaatgtgtaaaattaaatgtgtttttgggttgggtgtagggtttttttttgtatgtttgttaattgtattaatatttattttttttttggatggttttgggaggaggtttgttatgaaggtttttttaagttgttgggtagtataaaggtgattttatatttttttagttgtttaggtttaagatgtggatattgagtttttaatgtgggtattttttttttggaattttagtttttttatttgtaaaaagtagataggaattttttttttgtggggttgtaatgggaattggagaaaatatattttaagtgttttgtgtgatgtttggtattgaggtatttggtggtatttaatatttggtattgtttggttattattattattttttgggttgattatgttttaatgttttttttttaattttttgtttttttttttttttggtttttagggtggttgagttttttagtttgtattttttgtaaatataagatgaattgtaagttgtggatgttttttattattgtgtagttgttggtgttggagtgtaagttttgttagaagtagtatttgtttattgttgagtgtgtggagttttttagtttgtttagttttattgagatgtaggtgaagatatggttttagaattgttgtgttaaggtaaagagattataagaggtagagttggagaagttgaagatggttgttaagtttatgttgttattggttgtttttggttttttttttttttttggtggttttgtagttgtagtggttgtggtgggtgttttgttttatggtgtttttggttttttttagtgtgttgtgttgtttgtggtgtttgtgggattttatatggtttatgtgggttatagtatgtattatttgatatagagggttttaggttgtttatttgtgggttagttgatttttttagttttggtgttgtatttttgatgtgtttttttgtttggtattgttagttgttttttttttaatttttatattgttttagttttatttttttgttttttgagtttattttttgaagtttgatttttgttaaaaagtggttggaagagttttttagtatttttttagtatttagatttatatttttgagttaaagatggggaaattgagggtagagaggttaatagatttatttaaggtttttagtagaattgatagttgaatagagttagaggttatgttttttgtatagtttttttttgttttgatattaggtaagaaaagtgtagagaaattggtgtttgatgattttggaaatgagaataattttaaaaaaaaaaaaaaaaaaaaaaaaaaaaaaaaaaaagaaaagagaaaaaaaagattagttagttaggaagatgaattttagttttttttattggaaaatttaagataagtttaataataaaatatttgttttggggggtagggaaaatatagatgtgttgtaaaggtaggttgaagggattttttttttattagtattagaaatataattgtaaaattaaaaaaaaaaaaaaattttttttatttaatagtatatttgtgtggtttttaaatatttttttggaagggattgtgtgtattatgtaatatattgtatatttgaaattttattattatttatattatagttatatttgttaaataaattaattttaagttataaaaattatttttttattgattgagttttttattttaattttgttttttgttatttttttatgtgtatagttgttttttagtttgatggtatttttatgatagtaattttgaaaggtgataatagggtatgtagggatagaggggggtgtttttttgaatatttatgatagatttgtattaggaaagttaagtggagagttgaagtaattatttaggataattaggtttaattttttaatttattttaagttgaaattgatatttatttggg

SEQ ID NO: 416 - DNA, 50 bp, homo sapiens
aaatatatttcaagtgccttgcgcgatgcccggcaccgaggcacttggcg

SEQ ID NO: 417 - DNA, 50 bp, homo sapiens
aaatatattttaagtgttttgcgcgatgttcggtatcgaggtatttggcg

SEQ ID NO: 418 - DNA, 50 bp, homo sapiens
aaatatattttaagtgttttgtgtgatgtttggtattgaggtatttggtg

SEQ ID NO: 419 - DNA, 50 bp, homo sapiens
cgttaagtgtttcggtgtcgggtatcgcgtaaggtatttgaaatatattt

SEQ ID NO: 420 - DNA, 50 bp, homo sapiens
tgttaagtgttttggtgttgggtattgtgtaaggtatttgaaatatattt

SEQ ID NO: 421 - DNA, 3001 bp, homo sapiens
ggagatatttcaggagcacgggaaattcccaagttttcctcgtttcctccgattattttgctcggcataatagcagccagatttcaatggcgtgatgctgaggaatgatttttatctggggattaaacgtctttgaaaggccagtccctccctaagcctaatggccggagaaggtggccccgctctgggttgtcgccgctgaagggagtgacgtttctctcggcgcccgcccctcgggcggcccggcggaaagctagttgggggccaagcgcttcccggactcccggtggcctccagcagggaagaagcggggtgttaacacgagatttcgtttgactcacatcctggtggtctgaaagtccaaaggatcgttgtgttttctttgttttgttttgttttttctgtttgtttgtggttgttttttagagaggtgtgaaaaaatgcatacttaggcaaaacccgcgtggtgaaacatcttcgatttgaattcactttctgccgggaaagctgctgcataggcaaagtgtcctttccaacgcttagggccttgggccccaagaccccgaagtcaaagcgatcccggctgtgttgggataatttgttccacattttatccgggggcagtccccagcagaccccatccccgacctgcactagtcctgcgctctgatgcttcttcactgtccacccttgaggtttattttgaagccaaaagaaaaagacagctgggcatgttgatgtctgctgactatgccacaggttgaggggagaggcgatctcaacactccccccgcaacaacatcaacacacacacacacacacacacacaaacgtttgagtggggccagagggccctggcgccaggggtgaacgcgatccaacagaggactgagacaatctaaagaaaaagcccattagaataaagcagcccctcgttctccgctccagatgacactttctgtttctaagagggctggccacagtgcaccctccatgatggtctgcgctgctccatctctggtctgcgggaactactcctagaatcccgtaggagcgaagtgttccggggaaagtgtagaatttgatttggattctatgccacaaaactgcctagccccacactgaagcactccgtgggcactgataaatgtttggccaacgcgtaaaactaaatgtgcccttgggctgggcgcagggcctctttctgcatgttcgtcaactgtattaacatccacctttcctctggatggccctgggaggaggcccgccatgaaggccttcctaagccgccgggcagcacaaaggtgatttcacatcttcccagctgtttaggcctaagatgtggacatcgagccttcaacgtgggtatttttctcctggaatcttagtttcttcatttgcaaaaagtagacaggaacttctcccctgcggggttgcaatgggaattggagaaaatatatttcaagtgccttgcgcgatgcccggcaccgaggcacttggcggcactcaatatctggtattgtttggctattattactacttcttgggctgatcatgctccaatgcttctctcttaaccccttgctttttttttctttcggccctcagggcggctgagccccccagcctgcaccctccgcaaacacaagacgaaccgtaagccgcggacgcccttcaccaccgcgcagctgctggcgctggagcgcaagttccgccagaagcagtacctgtccatcgccgagcgcgcggagttctccagctcgctcagcctcactgagacgcaggtgaagatatggttccagaaccgccgcgccaaggcaaagagactacaagaggcagagctggagaagctgaagatggccgccaagcccatgctgccaccggctgccttcggcctctccttccctctcggcggccccgcagctgtagcggccgcggcgggtgcctcgctctacggtgcctctggccccttccagcgcgccgcgctgcctgtggcgcccgtgggactctacacggcccatgtgggctacagcatgtaccacctgacatagagggtcccaggtcgcccacctgtgggccagccgattcctccagccctggtgctgtacccccgacgtgctcccctgctcggcaccgccagccgccttccctttaaccctcacactgctccagtttcacctctttgctccctgagttcactctccgaagtctgatccctgccaaaaagtggctggaagagtcccttagtactcttctagcatttagatctacactctcgagttaaagatggggaaactgagggcagagaggttaacagatttatctaaggtccccagcagaattgacagttgaacagagctagaggccatgtctcctgcatagcttttccctgtcctgacaccaggcaagaaaagcgcagagaaatcggtgtctgacgattttggaaatgagaacaatctcaaaaaaaaaaaaaaaaaaaaaaaaaaaaaaaaaaaagaaaagagaaaaaaaagactagccagccaggaagatgaatcctagcttcttccattggaaaatttaagacaagttcaacaacaaaacatttgctctggggggcagggaaaacacagatgtgttgcaaaggtaggttgaagggacctctctcttaccagtaccagaaacacaattgtaaaattaaaaaaaaaaaaaaactctttctatttaacagtacatttgtgtggctctcaaacatccctttggaagggattgtgtgtactatgtaatatactgtatatttgaaattttattatcatttatattatagctatatttgttaaataaattaattttaagctacaaaaattatctctttactgattgagtcttttattttaattttgcttcttgctatctctttatgtgtacagttgcttttcagtttgacggtacttttacgacagcaactttgaaaggtgataacagggtatgcagggatagaggggggtgtctttttgaacac

SEQ ID NO: 422 - DNA, 3001 bp, homo sapiens
ggagatattttaggagtacgggaaatttttaagtttttttcgtttttttcgattattttgttcggtataatagtagttagattttaatggcgtgatgttgaggaatgatttttatttggggattaaacgtttttgaaaggttagtttttttttaagtttaatggtcggagaaggtggtttcgttttgggttgtcgtcgttgaagggagtgacgtttttttcggcgttcgtttttcgggcggttcggcggaaagttagttgggggttaagcgtttttcggattttcggtggtttttagtagggaagaagcggggtgttaatacgagatttcgtttgatttatattttggtggtttgaaagtttaaaggatcgttgtgttttttttgttttgttttgttttttttgtttgtttgtggttgttttttagagaggtgtgaaaaaatgtatatttaggtaaaattcgcgtggtgaaatattttcgatttgaatttattttttgtcgggaaagttgttgtataggtaaagtgttttttttaacgtttagggttttgggttttaagatttcgaagttaaagcgatttcggttgtgttgggataatttgttttatattttattcgggggtagtttttagtagattttattttcgatttgtattagttttgcgttttgatgtttttttattgtttatttttgaggtttattttgaagttaaaagaaaaagatagttgggtatgttgatgtttgttgattatgttataggttgaggggagaggcgattttaatatttttttcgtaataatattaatatatatatatatatatatatataaacgtttgagtggggttagagggttttggcgttaggggtgaacgcgatttaatagaggattgagataatttaaagaaaaagtttattagaataaagtagtttttcgtttttcgttttagatgatattttttgtttttaagagggttggttatagtgtattttttatgatggtttgcgttgttttatttttggtttgcgggaattatttttagaatttcgtaggagcgaagtgtttcggggaaagtgtagaatttgatttggattttatgttataaaattgtttagttttatattgaagtatttcgtgggtattgataaatgtttggttaacgcgtaaaattaaatgtgtttttgggttgggcgtagggtttttttttgtatgttcgttaattgtattaatatttattttttttttggatggttttgggaggaggttcgttatgaaggtttttttaagtcgtcgggtagtataaaggtgattttatatttttttagttgtttaggtttaagatgtggatatcgagtttttaacgtgggtattttttttttggaattttagtttttttatttgtaaaaagtagataggaattttttttttgcggggttgtaatgggaattggagaaaatatattttaagtgttttgcgcgatgttcggtatcgaggtatttggcggtatttaatatttggtattgtttggttattattattattttttgggttgattatgttttaatgttttttttttaattttttgttttttttttttttcggtttttagggcggttgagttttttagtttgtatttttcgtaaatataagacgaatcgtaagtcgcggacgttttttattatcgcgtagttgttggcgttggagcgtaagtttcgttagaagtagtatttgtttatcgtcgagcgcgcggagttttttagttcgtttagttttattgagacgtaggtgaagatatggttttagaatcgtcgcgttaaggtaaagagattataagaggtagagttggagaagttgaagatggtcgttaagtttatgttgttatcggttgttttcggtttttttttttttttcggcggtttcgtagttgtagcggtcgcggcgggtgtttcgttttacggtgtttttggttttttttagcgcgtcgcgttgtttgtggcgttcgtgggattttatacggtttatgtgggttatagtatgtattatttgatatagagggttttaggtcgtttatttgtgggttagtcgatttttttagttttggtgttgtattttcgacgtgtttttttgttcggtatcgttagtcgttttttttttaatttttatattgttttagttttatttttttgttttttgagtttatttttcgaagtttgatttttgttaaaaagtggttggaagagttttttagtatttttttagtatttagatttatattttcgagttaaagatggggaaattgagggtagagaggttaatagatttatttaaggtttttagtagaattgatagttgaatagagttagaggttatgttttttgtatagtttttttttgttttgatattaggtaagaaaagcgtagagaaatcggtgtttgacgattttggaaatgagaataattttaaaaaaaaaaaaaaaaaaaaaaaaaaaaaaaaaaaagaaaagagaaaaaaaagattagttagttaggaagatgaattttagttttttttattggaaaatttaagataagtttaataataaaatatttgttttggggggtagggaaaatatagatgtgttgtaaaggtaggttgaagggattttttttttattagtattagaaatataattgtaaaattaaaaaaaaaaaaaaattttttttatttaatagtatatttgtgtggtttttaaatatttttttggaagggattgtgtgtattatgtaatatattgtatatttgaaattttattattatttatattatagttatatttgttaaataaattaattttaagttataaaaattatttttttattgattgagttttttattttaattttgttttttgttatttttttatgtgtatagttgttttttagtttgacggtatttttacgatagtaattttgaaaggtgataatagggtatgtagggatagaggggggtgtttttttgaatat

SEQ ID NO: 423 - DNA, 3001 bp, homo sapiens
ggagatattttaggagtatgggaaatttttaagttttttttgttttttttgattattttgtttggtataatagtagttagattttaatggtgtgatgttgaggaatgatttttatttggggattaaatgtttttgaaaggttagtttttttttaagtttaatggttggagaaggtggttttgttttgggttgttgttgttgaagggagtgatgttttttttggtgtttgttttttgggtggtttggtggaaagttagttgggggttaagtgttttttggatttttggtggtttttagtagggaagaagtggggtgttaatatgagattttgtttgatttatattttggtggtttgaaagtttaaaggattgttgtgttttttttgttttgttttgttttttttgtttgtttgtggttgttttttagagaggtgtgaaaaaatgtatatttaggtaaaatttgtgtggtgaaatatttttgatttgaatttattttttgttgggaaagttgttgtataggtaaagtgttttttttaatgtttagggttttgggttttaagattttgaagttaaagtgattttggttgtgttgggataatttgttttatattttatttgggggtagtttttagtagattttatttttgatttgtattagttttgtgttttgatgtttttttattgtttatttttgaggtttattttgaagttaaaagaaaaagatagttgggtatgttgatgtttgttgattatgttataggttgaggggagaggtgattttaatattttttttgtaataatattaatatatatatatatatatatatataaatgtttgagtggggttagagggttttggtgttaggggtgaatgtgatttaatagaggattgagataatttaaagaaaaagtttattagaataaagtagttttttgttttttgttttagatgatattttttgtttttaagagggttggttatagtgtattttttatgatggtttgtgttgttttatttttggtttgtgggaattatttttagaattttgtaggagtgaagtgttttggggaaagtgtagaatttgatttggattttatgttataaaattgtttagttttatattgaagtattttgtgggtattgataaatgtttggttaatgtgtaaaattaaatgtgtttttgggttgggtgtagggtttttttttgtatgtttgttaattgtattaatatttattttttttttggatggttttgggaggaggtttgttatgaaggtttttttaagttgttgggtagtataaaggtgattttatatttttttagttgtttaggtttaagatgtggatattgagtttttaatgtgggtattttttttttggaattttagtttttttatttgtaaaaagtagataggaattttttttttgtggggttgtaatgggaattggagaaaatatattttaagtgttttgtgtgatgtttggtattgaggtatttggtggtatttaatatttggtattgtttggttattattattattttttgggttgattatgttttaatgttttttttttaattttttgtttttttttttttttggtttttagggtggttgagttttttagtttgtattttttgtaaatataagatgaattgtaagttgtggatgttttttattattgtgtagttgttggtgttggagtgtaagttttgttagaagtagtatttgtttattgttgagtgtgtggagttttttagtttgtttagttttattgagatgtaggtgaagatatggttttagaattgttgtgttaaggtaaagagattataagaggtagagttggagaagttgaagatggttgttaagtttatgttgttattggttgtttttggttttttttttttttttggtggttttgtagttgtagtggttgtggtgggtgttttgttttatggtgtttttggttttttttagtgtgttgtgttgtttgtggtgtttgtgggattttatatggtttatgtgggttatagtatgtattatttgatatagagggttttaggttgtttatttgtgggttagttgatttttttagttttggtgttgtatttttgatgtgtttttttgtttggtattgttagttgttttttttttaatttttatattgttttagttttatttttttgttttttgagtttattttttgaagtttgatttttgttaaaaagtggttggaagagttttttagtatttttttagtatttagatttatatttttgagttaaagatggggaaattgagggtagagaggttaatagatttatttaaggtttttagtagaattgatagttgaatagagttagaggttatgttttttgtatagtttttttttgttttgatattaggtaagaaaagtgtagagaaattggtgtttgatgattttggaaatgagaataattttaaaaaaaaaaaaaaaaaaaaaaaaaaaaaaaaaaaagaaaagagaaaaaaaagattagttagttaggaagatgaattttagttttttttattggaaaatttaagataagtttaataataaaatatttgttttggggggtagggaaaatatagatgtgttgtaaaggtaggttgaagggattttttttttattagtattagaaatataattgtaaaattaaaaaaaaaaaaaaattttttttatttaatagtatatttgtgtggtttttaaatatttttttggaagggattgtgtgtattatgtaatatattgtatatttgaaattttattattatttatattatagttatatttgttaaataaattaattttaagttataaaaattatttttttattgattgagttttttattttaattttgttttttgttatttttttatgtgtatagttgttttttagtttgatggtatttttatgatagtaattttgaaaggtgataatagggtatgtagggatagaggggggtgtttttttgaatat

SEQ ID NO: 424 - DNA, 3001 bp, homo sapiens
gtgtttaaaaagatatttttttttatttttgtatattttgttattattttttaaagttgttgtcgtaaaagtatcgttaaattgaaaagtaattgtatatataaagagatagtaagaagtaaaattaaaataaaagatttaattagtaaagagataatttttgtagtttaaaattaatttatttaataaatatagttataatataaatgataataaaattttaaatatatagtatattatatagtatatataattttttttaaagggatgtttgagagttatataaatgtattgttaaatagaaagagtttttttttttttttaattttataattgtgtttttggtattggtaagagagaggtttttttaatttatttttgtaatatatttgtgttttttttgttttttagagtaaatgttttgttgttgaatttgttttaaattttttaatggaagaagttaggatttatttttttggttggttagttttttttttttttttttttttttttttttttttttttttttttttttttttttgagattgtttttatttttaaaatcgttagatatcgatttttttgcgttttttttgtttggtgttaggatagggaaaagttatgtaggagatatggtttttagttttgtttaattgttaattttgttggggattttagataaatttgttaatttttttgtttttagtttttttatttttaattcgagagtgtagatttaaatgttagaagagtattaagggatttttttagttattttttggtagggattagatttcggagagtgaatttagggagtaaagaggtgaaattggagtagtgtgagggttaaagggaaggcggttggcggtgtcgagtaggggagtacgtcgggggtatagtattagggttggaggaatcggttggtttataggtgggcgatttgggattttttatgttaggtggtatatgttgtagtttatatgggtcgtgtagagttttacgggcgttataggtagcgcggcgcgttggaaggggttagaggtatcgtagagcgaggtattcgtcgcggtcgttatagttgcggggtcgtcgagagggaaggagaggtcgaaggtagtcggtggtagtatgggtttggcggttatttttagtttttttagttttgttttttgtagtttttttgttttggcgcggcggttttggaattatatttttatttgcgttttagtgaggttgagcgagttggagaatttcgcgcgttcggcgatggataggtattgtttttggcggaatttgcgttttagcgttagtagttgcgcggtggtgaagggcgttcgcggtttacggttcgttttgtgtttgcggagggtgtaggttggggggtttagtcgttttgagggtcgaaagaaaaaaaaagtaaggggttaagagagaagtattggagtatgattagtttaagaagtagtaataatagttaaataatattagatattgagtgtcgttaagtgtttcggtgtcgggtatcgcgtaaggtatttgaaatatattttttttaatttttattgtaatttcgtaggggagaagtttttgtttattttttgtaaatgaagaaattaagattttaggagaaaaatatttacgttgaaggttcgatgtttatattttaggtttaaatagttgggaagatgtgaaattatttttgtgttgttcggcggtttaggaaggtttttatggcgggtttttttttagggttatttagaggaaaggtggatgttaatatagttgacgaatatgtagaaagaggttttgcgtttagtttaagggtatatttagttttacgcgttggttaaatatttattagtgtttacggagtgttttagtgtggggttaggtagttttgtggtatagaatttaaattaaattttatatttttttcggaatatttcgtttttacgggattttaggagtagttttcgtagattagagatggagtagcgtagattattatggagggtgtattgtggttagtttttttagaaatagaaagtgttatttggagcggagaacgaggggttgttttattttaatgggttttttttttagattgttttagttttttgttggatcgcgtttatttttggcgttagggttttttggttttatttaaacgtttgtgtgtgtgtgtgtgtgtgtgtgttgatgttgttgcggggggagtgttgagatcgtttttttttttaatttgtggtatagttagtagatattaatatgtttagttgttttttttttttggttttaaaataaattttaagggtggatagtgaagaagtattagagcgtaggattagtgtaggtcggggatggggtttgttggggattgttttcggataaaatgtggaataaattattttaatatagtcgggatcgttttgatttcggggttttggggtttaaggttttaagcgttggaaaggatattttgtttatgtagtagttttttcggtagaaagtgaatttaaatcgaagatgttttattacgcgggttttgtttaagtatgtatttttttatatttttttaaaaaataattataaataaatagaaaaaataaaataaaataaagaaaatataacgattttttggatttttagattattaggatgtgagttaaacgaaatttcgtgttaatatttcgttttttttttgttggaggttatcgggagttcgggaagcgtttggtttttaattagtttttcgtcgggtcgttcgaggggcgggcgtcgagagaaacgttattttttttagcggcgataatttagagcggggttatttttttcggttattaggtttagggagggattggttttttaaagacgtttaatttttagataaaaattattttttagtattacgttattgaaatttggttgttattatgtcgagtaaaataatcggaggaaacgaggaaaatttgggaatttttcgtgtttttgaaatattttt

SEQ ID NO: 425 - DNA, 3001 bp, homo sapiens
gtgtttaaaaagatatttttttttatttttgtatattttgttattattttttaaagttgttgttgtaaaagtattgttaaattgaaaagtaattgtatatataaagagatagtaagaagtaaaattaaaataaaagatttaattagtaaagagataatttttgtagtttaaaattaatttatttaataaatatagttataatataaatgataataaaattttaaatatatagtatattatatagtatatataattttttttaaagggatgtttgagagttatataaatgtattgttaaatagaaagagtttttttttttttttaattttataattgtgtttttggtattggtaagagagaggtttttttaatttatttttgtaatatatttgtgttttttttgttttttagagtaaatgttttgttgttgaatttgttttaaattttttaatggaagaagttaggatttatttttttggttggttagttttttttttttttttttttttttttttttttttttttttttttttttttttttgagattgtttttatttttaaaattgttagatattgatttttttgtgttttttttgtttggtgttaggatagggaaaagttatgtaggagatatggtttttagttttgtttaattgttaattttgttggggattttagataaatttgttaatttttttgtttttagtttttttatttttaatttgagagtgtagatttaaatgttagaagagtattaagggatttttttagttattttttggtagggattagattttggagagtgaatttagggagtaaagaggtgaaattggagtagtgtgagggttaaagggaaggtggttggtggtgttgagtaggggagtatgttgggggtatagtattagggttggaggaattggttggtttataggtgggtgatttgggattttttatgttaggtggtatatgttgtagtttatatgggttgtgtagagttttatgggtgttataggtagtgtggtgtgttggaaggggttagaggtattgtagagtgaggtatttgttgtggttgttatagttgtggggttgttgagagggaaggagaggttgaaggtagttggtggtagtatgggtttggtggttatttttagtttttttagttttgttttttgtagtttttttgttttggtgtggtggttttggaattatatttttatttgtgttttagtgaggttgagtgagttggagaattttgtgtgtttggtgatggataggtattgtttttggtggaatttgtgttttagtgttagtagttgtgtggtggtgaagggtgtttgtggtttatggtttgttttgtgtttgtggagggtgtaggttggggggtttagttgttttgagggttgaaagaaaaaaaaagtaaggggttaagagagaagtattggagtatgattagtttaagaagtagtaataatagttaaataatattagatattgagtgttgttaagtgttttggtgttgggtattgtgtaaggtatttgaaatatattttttttaatttttattgtaattttgtaggggagaagtttttgtttattttttgtaaatgaagaaattaagattttaggagaaaaatatttatgttgaaggtttgatgtttatattttaggtttaaatagttgggaagatgtgaaattatttttgtgttgtttggtggtttaggaaggtttttatggtgggtttttttttagggttatttagaggaaaggtggatgttaatatagttgatgaatatgtagaaagaggttttgtgtttagtttaagggtatatttagttttatgtgttggttaaatatttattagtgtttatggagtgttttagtgtggggttaggtagttttgtggtatagaatttaaattaaattttatattttttttggaatattttgtttttatgggattttaggagtagtttttgtagattagagatggagtagtgtagattattatggagggtgtattgtggttagtttttttagaaatagaaagtgttatttggagtggagaatgaggggttgttttattttaatgggttttttttttagattgttttagttttttgttggattgtgtttatttttggtgttagggttttttggttttatttaaatgtttgtgtgtgtgtgtgtgtgtgtgtgttgatgttgttgtggggggagtgttgagattgtttttttttttaatttgtggtatagttagtagatattaatatgtttagttgttttttttttttggttttaaaataaattttaagggtggatagtgaagaagtattagagtgtaggattagtgtaggttggggatggggtttgttggggattgtttttggataaaatgtggaataaattattttaatatagttgggattgttttgattttggggttttggggtttaaggttttaagtgttggaaaggatattttgtttatgtagtagtttttttggtagaaagtgaatttaaattgaagatgttttattatgtgggttttgtttaagtatgtatttttttatatttttttaaaaaataattataaataaatagaaaaaataaaataaaataaagaaaatataatgattttttggatttttagattattaggatgtgagttaaatgaaattttgtgttaatattttgttttttttttgttggaggttattgggagtttgggaagtgtttggtttttaattagttttttgttgggttgtttgaggggtgggtgttgagagaaatgttattttttttagtggtgataatttagagtggggttattttttttggttattaggtttagggagggattggttttttaaagatgtttaatttttagataaaaattattttttagtattatgttattgaaatttggttgttattatgttgagtaaaataattggaggaaatgaggaaaatttgggaattttttgtgtttttgaaatattttt

SEQ ID NO: 426 - DNA, 50 bp, homo sapiens
agaatcgtcaatgaaacaccgatctggccttaaggtgacctcaaacaacg

SEQ ID NO: 427 - DNA, 50 bp, homo sapiens
agaatcgttaatgaaatatcgatttggttttaaggtgattttaaataacg

SEQ ID NO: 428 - DNA, 50 bp, homo sapiens
agaattgttaatgaaatattgatttggttttaaggtgattttaaataatg

SEQ ID NO: 429 - DNA, 50 bp, homo sapiens
cgttgtttgaggttattttaaggttagatcggtgttttattgacgatttt

SEQ ID NO: 430 - DNA, 50 bp, homo sapiens
tgttgtttgaggttattttaaggttagattggtgttttattgatgatttt

SEQ ID NO: 431 - DNA, 3001 bp, homo sapiens
ctcccagcgaccccggcgggacgcccagtggctgcgccgagccacccgccgcctgcacgccctcggagggcgccagggcgctctccttggcccccggcttcctgtggtcggccatgagcgcctccacgctgaagggcaggagcgaaggggacactttgggcttggccccctcctcgtccgcgcccatggcggctgccgtggccgcggcggcgctgggggcctggcccgcgcctccccccgccggcttgccgaaggcggagtcctccactttgacaccgagtggcaaagaagtcatgtcagcagccggggccatgcagagccgggcccccccttctgccgcagcactggccagccgccgggcatgggctccgggcgggctgggagcgcggccggcctctgcgagcgcccggggccctggccgggcggaccctcccgcgcgcgcctcccgcccctccccagcaggccagctccggcgtgctgggcctggcctccggtcgctgccgccgcgcaggcagagttcccgggagcactcgccggctccgggccctaccgcggctccccagagaacttgctaataaggcgaggccagcggggcggcggccaatcagcgcgcgagggggcgggcccggagcgatccattgggccgcgctcctggggactcgcccggaggcgcgctgggcctgggggcacgcagggcagggcccaggcggcggagggcaggggaggagagggggtgcccgggaaactttcctctgcgctgaagcccaagaggccctctctgcgggagtcccctgggtctctatctttctgtgttcccgggggattttcccttgttctcgttccttctcttctgccctcctctcctcccctcccctcccctcctcagccctcttttccgctcctctttttttccccgtccttgtttctctcctctactgcttcttttacctttctctttagtctgtggctgggtttccctgtgcccccctccactgtctgaccccccctcttcttctaccacaataatttgagttgaggttatttcttacacattccttttatatatagtttttaaaatacgcatggctatttatcctaggagaaagacatactattaacttcttttcaagaaacgaaacaaaaccaaaccttcattttcttcctgttctgaaatcttgtaaactttacctcgaggtaaaagtgggcctttgtctctaacttagagctggagtaaaccttgcgggaagaagctagcttcctgtagtgccaaggatgtgagaatacgtaagattatctagaatctgcagtcggttttcatacacgatgtgtattcccccccccccaccctcgctctgaacttctgtcccaagggtcacaacacctatagcgcccgggcggggaaaggagctgccagatccttttgatatagaacttactgaaataaaaccaacagaatcgtcaatgaaacaccgatctggccttaaggtgacctcaaacaacgcgtcctcggaaacaatgacatgtccctatctctgggccgctgatcctggaggggagaggcacatttgggggagggggctgggaaaagaggaaagttcctggaggtggactctagtgtgggacttgagaactcttcttttgccaatttcggagaaaacgtgatttaatgtttgctgttaataataataataataataaagacagaaaaaatgagttggggtcaggggagatgcaagatctgcctgaagcggggtcggggcttggccattttctgcgcctgtcgctttatggcctctcctcctgcggcccaggccagcggctctcagggagtgagcggaggtgattggcggctcactcggccctgccattgatgactgcggggttctaatctccaggaaacacaaggggctgccgtggccatttaggggtaattatccgagcgcggagggacagcgaattccctcgacttttaactgggcgcaataaaagctgtagattaggggcgtccagattagggaaaatgaattagagcgggaactttattatccggaagacgtccggggtctggcggcaggggtcgggctgcggacgccggagcgattggtagcctcccatctgtccacaggccgccgagatatgctgaggcctggggaagttcgggaataccggcatctgaattttacgcacatctccaggtttctaaaggacccaagactgcaactcaggcactgggcagtggttggggcttctagctcgagttgggccggctggacgcgcggtgcaccggggcctccggaggtttgcccgagagggtacaaggatagaagaccttaagacccaattttgaagctcagctcgctgaggctgagcaaggctgtagggcaaataccttgctggtagcccagccaggacagcgaacaacagcatcttcctcttcttcctcttcttcttcttcttcctcttcctctttttcttcctcttttctcctcctcctcatcctcctcttcctcctctcctcctcatctcctcctcctcctcctccttcttcttcctcttcctcttctttgagacggagttttgctcttgtcgcccaggctggagtgcaatggcgcgatctcagttcactccaacctccgcctcccaggttcaagcgattccaggacggcgaacttctattgctcccgttctaatcaaactctcgtcagaacaaccccctccgcacccagccagaatctccctttgtggccaggttaaagggggagaggaaacagaggcctatctgcttttggggccatttaaaaagcgagcagtgtgccttttcgagtctttgcttagttccgccctcgccctccttctgcaaatgttttgctcccaggtctctttaagaatctgatacagccaagaacttcttccctagaaaaatgcacacctacaaaaacacattacaagcaacggggcagacaacttcgggggctctggtcccaagtggagtcctccagtt

SEQ ID NO: 432 - DNA, 3001 bp, homo sapiens
tttttagcgatttcggcgggacgtttagtggttgcgtcgagttattcgtcgtttgtacgttttcggagggcgttagggcgttttttttggttttcggttttttgtggtcggttatgagcgtttttacgttgaagggtaggagcgaaggggatattttgggtttggtttttttttcgttcgcgtttatggcggttgtcgtggtcgcggcggcgttgggggtttggttcgcgttttttttcgtcggtttgtcgaaggcggagttttttattttgatatcgagtggtaaagaagttatgttagtagtcggggttatgtagagtcgggtttttttttttgtcgtagtattggttagtcgtcgggtatgggtttcgggcgggttgggagcgcggtcggtttttgcgagcgttcggggttttggtcgggcggattttttcgcgcgcgtttttcgtttttttttagtaggttagtttcggcgtgttgggtttggttttcggtcgttgtcgtcgcgtaggtagagttttcgggagtattcgtcggtttcgggttttatcgcggttttttagagaatttgttaataaggcgaggttagcggggcggcggttaattagcgcgcgagggggcgggttcggagcgatttattgggtcgcgtttttggggattcgttcggaggcgcgttgggtttgggggtacgtagggtagggtttaggcggcggagggtaggggaggagagggggtgttcgggaaatttttttttgcgttgaagtttaagaggttttttttgcgggagttttttgggtttttatttttttgtgttttcgggggatttttttttgttttcgtttttttttttttgtttttttttttttttttttttttttttttttagttttttttttcgttttttttttttttttcgtttttgttttttttttttattgttttttttatttttttttttagtttgtggttgggtttttttgtgtttttttttattgtttgattttttttttttttttattataataatttgagttgaggttattttttatatattttttttatatatagtttttaaaatacgtatggttatttattttaggagaaagatatattattaatttttttttaagaaacgaaataaaattaaatttttattttttttttgttttgaaattttgtaaattttatttcgaggtaaaagtgggtttttgtttttaatttagagttggagtaaattttgcgggaagaagttagttttttgtagtgttaaggatgtgagaatacgtaagattatttagaatttgtagtcggtttttatatacgatgtgtatttttttttttttattttcgttttgaatttttgttttaagggttataatatttatagcgttcgggcggggaaaggagttgttagatttttttgatatagaatttattgaaataaaattaatagaatcgttaatgaaatatcgatttggttttaaggtgattttaaataacgcgttttcggaaataatgatatgtttttatttttgggtcgttgattttggaggggagaggtatatttgggggagggggttgggaaaagaggaaagtttttggaggtggattttagtgtgggatttgagaattttttttttgttaatttcggagaaaacgtgatttaatgtttgttgttaataataataataataataaagatagaaaaaatgagttggggttaggggagatgtaagatttgtttgaagcggggtcggggtttggttattttttgcgtttgtcgttttatggtttttttttttgcggtttaggttagcggtttttagggagtgagcggaggtgattggcggtttattcggttttgttattgatgattgcggggttttaatttttaggaaatataaggggttgtcgtggttatttaggggtaattattcgagcgcggagggatagcgaattttttcgatttttaattgggcgtaataaaagttgtagattaggggcgtttagattagggaaaatgaattagagcgggaattttattattcggaagacgttcggggtttggcggtaggggtcgggttgcggacgtcggagcgattggtagttttttatttgtttataggtcgtcgagatatgttgaggtttggggaagttcgggaatatcggtatttgaattttacgtatatttttaggtttttaaaggatttaagattgtaatttaggtattgggtagtggttggggtttttagttcgagttgggtcggttggacgcgcggtgtatcggggttttcggaggtttgttcgagagggtataaggatagaagattttaagatttaattttgaagtttagttcgttgaggttgagtaaggttgtagggtaaatattttgttggtagtttagttaggatagcgaataatagtatttttttttttttttttttttttttttttttttttttttttttttttttttttttttttttttttttttatttttttttttttttttttttttttattttttttttttttttttttttttttttttttttttttttttttgagacggagttttgtttttgtcgtttaggttggagtgtaatggcgcgattttagtttattttaattttcgttttttaggtttaagcgattttaggacggcgaatttttattgttttcgttttaattaaattttcgttagaataatttttttcgtatttagttagaatttttttttgtggttaggttaaagggggagaggaaatagaggtttatttgtttttggggttatttaaaaagcgagtagtgtgttttttcgagtttttgtttagtttcgttttcgttttttttttgtaaatgttttgtttttaggtttttttaagaatttgatatagttaagaattttttttttagaaaaatgtatatttataaaaatatattataagtaacggggtagataatttcgggggttttggttttaagtggagttttttagtt

SEQ ID NO: 433 - DNA, 3001 bp, homo sapiens
tttttagtgattttggtgggatgtttagtggttgtgttgagttatttgttgtttgtatgtttttggagggtgttagggtgttttttttggtttttggttttttgtggttggttatgagtgtttttatgttgaagggtaggagtgaaggggatattttgggtttggttttttttttgtttgtgtttatggtggttgttgtggttgtggtggtgttgggggtttggtttgtgtttttttttgttggtttgttgaaggtggagttttttattttgatattgagtggtaaagaagttatgttagtagttggggttatgtagagttgggtttttttttttgttgtagtattggttagttgttgggtatgggttttgggtgggttgggagtgtggttggtttttgtgagtgtttggggttttggttgggtggatttttttgtgtgtgttttttgtttttttttagtaggttagttttggtgtgttgggtttggtttttggttgttgttgttgtgtaggtagagtttttgggagtatttgttggttttgggttttattgtggttttttagagaatttgttaataaggtgaggttagtggggtggtggttaattagtgtgtgagggggtgggtttggagtgatttattgggttgtgtttttggggatttgtttggaggtgtgttgggtttgggggtatgtagggtagggtttaggtggtggagggtaggggaggagagggggtgtttgggaaatttttttttgtgttgaagtttaagaggttttttttgtgggagttttttgggtttttatttttttgtgtttttgggggatttttttttgtttttgtttttttttttttgtttttttttttttttttttttttttttttttagtttttttttttgtttttttttttttttttgtttttgttttttttttttattgttttttttatttttttttttagtttgtggttgggtttttttgtgtttttttttattgtttgattttttttttttttttattataataatttgagttgaggttattttttatatattttttttatatatagtttttaaaatatgtatggttatttattttaggagaaagatatattattaatttttttttaagaaatgaaataaaattaaatttttattttttttttgttttgaaattttgtaaattttattttgaggtaaaagtgggtttttgtttttaatttagagttggagtaaattttgtgggaagaagttagttttttgtagtgttaaggatgtgagaatatgtaagattatttagaatttgtagttggtttttatatatgatgtgtatttttttttttttatttttgttttgaatttttgttttaagggttataatatttatagtgtttgggtggggaaaggagttgttagatttttttgatatagaatttattgaaataaaattaatagaattgttaatgaaatattgatttggttttaaggtgattttaaataatgtgtttttggaaataatgatatgtttttatttttgggttgttgattttggaggggagaggtatatttgggggagggggttgggaaaagaggaaagtttttggaggtggattttagtgtgggatttgagaattttttttttgttaattttggagaaaatgtgatttaatgtttgttgttaataataataataataataaagatagaaaaaatgagttggggttaggggagatgtaagatttgtttgaagtggggttggggtttggttattttttgtgtttgttgttttatggtttttttttttgtggtttaggttagtggtttttagggagtgagtggaggtgattggtggtttatttggttttgttattgatgattgtggggttttaatttttaggaaatataaggggttgttgtggttatttaggggtaattatttgagtgtggagggatagtgaatttttttgatttttaattgggtgtaataaaagttgtagattaggggtgtttagattagggaaaatgaattagagtgggaattttattatttggaagatgtttggggtttggtggtaggggttgggttgtggatgttggagtgattggtagttttttatttgtttataggttgttgagatatgttgaggtttggggaagtttgggaatattggtatttgaattttatgtatatttttaggtttttaaaggatttaagattgtaatttaggtattgggtagtggttggggtttttagtttgagttgggttggttggatgtgtggtgtattggggtttttggaggtttgtttgagagggtataaggatagaagattttaagatttaattttgaagtttagtttgttgaggttgagtaaggttgtagggtaaatattttgttggtagtttagttaggatagtgaataatagtatttttttttttttttttttttttttttttttttttttttttttttttttttttttttttttttttttttatttttttttttttttttttttttttattttttttttttttttttttttttttttttttttttttttttttgagatggagttttgtttttgttgtttaggttggagtgtaatggtgtgattttagtttattttaatttttgttttttaggtttaagtgattttaggatggtgaatttttattgtttttgttttaattaaatttttgttagaataattttttttgtatttagttagaatttttttttgtggttaggttaaagggggagaggaaatagaggtttatttgtttttggggttatttaaaaagtgagtagtgtgtttttttgagtttttgtttagttttgtttttgttttttttttgtaaatgttttgtttttaggtttttttaagaatttgatatagttaagaattttttttttagaaaaatgtatatttataaaaatatattataagtaatggggtagataattttgggggttttggttttaagtggagttttttagtt

SEQ ID NO: 434 - DNA, 3001 bp, homo sapiens
aattggaggattttatttgggattagagttttcgaagttgtttgtttcgttgtttgtaatgtgtttttgtaggtgtgtatttttttagggaagaagtttttggttgtattagatttttaaagagatttgggagtaaaatatttgtagaaggagggcgagggcggaattaagtaaagattcgaaaaggtatattgttcgttttttaaatggttttaaaagtagataggtttttgttttttttttttttttaatttggttataaagggagattttggttgggtgcggagggggttgttttgacgagagtttgattagaacgggagtaatagaagttcgtcgttttggaatcgtttgaatttgggaggcggaggttggagtgaattgagatcgcgttattgtattttagtttgggcgataagagtaaaatttcgttttaaagaagaggaagaggaagaagaaggaggaggaggaggaggagatgaggaggagaggaggaagaggaggatgaggaggaggagaaaagaggaagaaaaagaggaagaggaagaagaagaagaagaggaagaagaggaagatgttgttgttcgttgttttggttgggttattagtaaggtatttgttttatagttttgtttagttttagcgagttgagttttaaaattgggttttaaggttttttatttttgtattttttcgggtaaattttcggaggtttcggtgtatcgcgcgtttagtcggtttaattcgagttagaagttttaattattgtttagtgtttgagttgtagttttgggttttttagaaatttggagatgtgcgtaaaatttagatgtcggtattttcgaatttttttaggttttagtatatttcggcggtttgtggatagatgggaggttattaatcgtttcggcgttcgtagttcgatttttgtcgttagatttcggacgtttttcggataataaagttttcgttttaatttattttttttaatttggacgtttttaatttatagtttttattgcgtttagttaaaagtcgagggaattcgttgttttttcgcgttcggataattatttttaaatggttacggtagttttttgtgttttttggagattagaatttcgtagttattaatggtagggtcgagtgagtcgttaattattttcgtttattttttgagagtcgttggtttgggtcgtaggaggagaggttataaagcgataggcgtagaaaatggttaagtttcgatttcgttttaggtagattttgtattttttttgattttaatttattttttttgtttttattattattattattattaatagtaaatattaaattacgtttttttcgaaattggtaaaagaagagtttttaagttttatattagagtttatttttaggaatttttttttttttttagtttttttttttaaatgtgttttttttttttaggattagcggtttagagatagggatatgttattgttttcgaggacgcgttgtttgaggttattttaaggttagatcggtgttttattgacgattttgttggttttattttagtaagttttatattaaaaggatttggtagttttttttttcgttcgggcgttataggtgttgtgatttttgggatagaagtttagagcgagggtgggggggggggaatatatatcgtgtatgaaaatcgattgtagattttagataattttacgtatttttatatttttggtattataggaagttagttttttttcgtaaggtttattttagttttaagttagagataaaggtttatttttatttcgaggtaaagtttataagattttagaataggaagaaaatgaaggtttggttttgtttcgttttttgaaaagaagttaatagtatgttttttttttaggataaatagttatgcgtattttaaaaattatatataaaaggaatgtgtaagaaataattttaatttaaattattgtggtagaagaagagggggggttagatagtggaggggggtatagggaaatttagttatagattaaagagaaaggtaaaagaagtagtagaggagagaaataaggacggggaaaaaaagaggagcggaaaagagggttgaggaggggaggggaggggaggagaggagggtagaagagaaggaacgagaataagggaaaatttttcgggaatatagaaagatagagatttaggggattttcgtagagagggttttttgggttttagcgtagaggaaagtttttcgggtattttttttttttttttgtttttcgtcgtttgggttttgttttgcgtgtttttaggtttagcgcgttttcgggcgagtttttaggagcgcggtttaatggatcgtttcgggttcgttttttcgcgcgttgattggtcgtcgtttcgttggtttcgttttattagtaagttttttggggagtcgcggtagggttcggagtcggcgagtgttttcgggaattttgtttgcgcggcggtagcgatcggaggttaggtttagtacgtcggagttggtttgttggggaggggcgggaggcgcgcgcgggagggttcgttcggttagggtttcgggcgttcgtagaggtcggtcgcgtttttagttcgttcggagtttatgttcggcggttggttagtgttgcggtagaagggggggttcggttttgtatggtttcggttgttgatatgatttttttgttattcggtgttaaagtggaggatttcgttttcggtaagtcggcggggggaggcgcgggttaggtttttagcgtcgtcgcggttacggtagtcgttatgggcgcggacgaggagggggttaagtttaaagtgtttttttcgtttttgttttttagcgtggaggcgtttatggtcgattataggaagtcgggggttaaggagagcgttttggcgtttttcgagggcgtgtaggcggcgggtggttcggcgtagttattgggcgtttcgtcggggtcgttgggag

SEQ ID NO: 435 - DNA, 3001 bp, homo sapiens
aattggaggattttatttgggattagagtttttgaagttgtttgttttgttgtttgtaatgtgtttttgtaggtgtgtatttttttagggaagaagtttttggttgtattagatttttaaagagatttgggagtaaaatatttgtagaaggagggtgagggtggaattaagtaaagatttgaaaaggtatattgtttgttttttaaatggttttaaaagtagataggtttttgttttttttttttttttaatttggttataaagggagattttggttgggtgtggagggggttgttttgatgagagtttgattagaatgggagtaatagaagtttgttgttttggaattgtttgaatttgggaggtggaggttggagtgaattgagattgtgttattgtattttagtttgggtgataagagtaaaattttgttttaaagaagaggaagaggaagaagaaggaggaggaggaggaggagatgaggaggagaggaggaagaggaggatgaggaggaggagaaaagaggaagaaaaagaggaagaggaagaagaagaagaagaggaagaagaggaagatgttgttgtttgttgttttggttgggttattagtaaggtatttgttttatagttttgtttagttttagtgagttgagttttaaaattgggttttaaggttttttatttttgtatttttttgggtaaatttttggaggttttggtgtattgtgtgtttagttggtttaatttgagttagaagttttaattattgtttagtgtttgagttgtagttttgggttttttagaaatttggagatgtgtgtaaaatttagatgttggtatttttgaatttttttaggttttagtatattttggtggtttgtggatagatgggaggttattaattgttttggtgtttgtagtttgatttttgttgttagattttggatgttttttggataataaagtttttgttttaatttattttttttaatttggatgtttttaatttatagtttttattgtgtttagttaaaagttgagggaatttgttgtttttttgtgtttggataattatttttaaatggttatggtagttttttgtgttttttggagattagaattttgtagttattaatggtagggttgagtgagttgttaattatttttgtttattttttgagagttgttggtttgggttgtaggaggagaggttataaagtgataggtgtagaaaatggttaagttttgattttgttttaggtagattttgtattttttttgattttaatttattttttttgtttttattattattattattattaatagtaaatattaaattatgttttttttgaaattggtaaaagaagagtttttaagttttatattagagtttatttttaggaatttttttttttttttagtttttttttttaaatgtgttttttttttttaggattagtggtttagagatagggatatgttattgtttttgaggatgtgttgtttgaggttattttaaggttagattggtgttttattgatgattttgttggttttattttagtaagttttatattaaaaggatttggtagtttttttttttgtttgggtgttataggtgttgtgatttttgggatagaagtttagagtgagggtgggggggggggaatatatattgtgtatgaaaattgattgtagattttagataattttatgtatttttatatttttggtattataggaagttagtttttttttgtaaggtttattttagttttaagttagagataaaggtttatttttattttgaggtaaagtttataagattttagaataggaagaaaatgaaggtttggttttgttttgttttttgaaaagaagttaatagtatgttttttttttaggataaatagttatgtgtattttaaaaattatatataaaaggaatgtgtaagaaataattttaatttaaattattgtggtagaagaagagggggggttagatagtggaggggggtatagggaaatttagttatagattaaagagaaaggtaaaagaagtagtagaggagagaaataaggatggggaaaaaaagaggagtggaaaagagggttgaggaggggaggggaggggaggagaggagggtagaagagaaggaatgagaataagggaaaattttttgggaatatagaaagatagagatttaggggatttttgtagagagggttttttgggttttagtgtagaggaaagttttttgggtattttttttttttttttgttttttgttgtttgggttttgttttgtgtgtttttaggtttagtgtgtttttgggtgagtttttaggagtgtggtttaatggattgttttgggtttgtttttttgtgtgttgattggttgttgttttgttggttttgttttattagtaagttttttggggagttgtggtagggtttggagttggtgagtgtttttgggaattttgtttgtgtggtggtagtgattggaggttaggtttagtatgttggagttggtttgttggggaggggtgggaggtgtgtgtgggagggtttgtttggttagggttttgggtgtttgtagaggttggttgtgtttttagtttgtttggagtttatgtttggtggttggttagtgttgtggtagaagggggggtttggttttgtatggttttggttgttgatatgatttttttgttatttggtgttaaagtggaggattttgtttttggtaagttggtggggggaggtgtgggttaggtttttagtgttgttgtggttatggtagttgttatgggtgtggatgaggagggggttaagtttaaagtgttttttttgtttttgttttttagtgtggaggtgtttatggttgattataggaagttgggggttaaggagagtgttttggtgttttttgagggtgtgtaggtggtgggtggtttggtgtagttattgggtgttttgttggggttgttgggag

SEQ ID NO: 436 - DNA, 50 bp, homo sapiens
cgccaccccgtgcagaccccggccagccctgcactccctcagtgcaccgg

SEQ ID NO: 437 - DNA, 50 bp, homo sapiens
cgttatttcgtgtagatttcggttagttttgtatttttttagtgtatcgg

SEQ ID NO: 438 - DNA, 50 bp, homo sapiens
tgttattttgtgtagattttggttagttttgtatttttttagtgtattgg

SEQ ID NO: 439 - DNA, 50 bp, homo sapiens
tcggtgtattgagggagtgtagggttggtcggggtttgtacggggtggcg

SEQ ID NO: 440 - DNA, 50 bp, homo sapiens
ttggtgtattgagggagtgtagggttggttggggtttgtatggggtggtg

SEQ ID NO: 441 - DNA, 3001 bp, homo sapiens
ttcttttttaggattttgtgttcctttgtggtaaacacctagaagagaaggagcatctctcttttttttttttctttagacagtgtcttgctctgtcgcccaggcaggaatgtcatggaatgaccatagcatggctcattgcagccttgacctcccaggctcaagcgatcctcccacctcagcctcctgagtagctgggactacaagtacaagccacatcaggtggctaattttttttatttcttttgtagagatggggtctgccagctcctgggctcaagaaatcctcccaccttggcctcccaaagtgttgggattacaggcgtgagccactgtggctggccggagcacctcttaaaactctagaaagttagaaggtctcaaagataacttctttgcacaattagagatgaaccaggaaataccaaataactggctgcctatacttttttgtattcccttcagcctttgtattgccacactcattacaggaagaaaacaaatttaatagttatctggtatatactgttatgcttcatttcttgttgtttttgtttgtttgcttttagtttcatcacaagaatgttatgcttcatttcttaacacctttctcccagctagcaaattcctttaaggcaatgtgtttagtgaggaagcagccgacaatttctagtacccctctgccactaacttgtaagatcttgaaaagtcaactttacctttctatgtttcagctaaaatcactacctgatttgaaatctttacttgatctctcaggcctttgtagtttttatacattcactcttcttcaccattttactggcttcaataacgcctttctgatgacctctccaggtgactctgctcttaagctgtgggctgtccccttccagggaagacaccttgggtcaccgcccccaaacagccaggtccctccttttaaagacacacacaactccctaagttgataaaggttctctccttccttgccaaccagttccactctctgtgcctcttttgctggccagctcctgcacccaaacctcagtctccctttgtcccccttttctctcatcaaacacctcctttttcctgttgcttcccccaagagggggtggaggatgcttgggacataagtcttcagagccttgggagttatacagctttgcaattcagccccagtaccccaaggactgccccaatctgaaccagcgtctgtacccaaagggccctcattcctcatcaatcacctccttccctcccagcaaagaactgctccagccctgacagcctgagcttggcccccatgcctccaccccaatccccaggtcctacctgcattagggctctaacaccgcctaaggcctaacccagttccacgtcctgccatcctctcagcccatagaccccaatcccggttcccttcggacccagtgttccttctccgcgaccctgaccacgaccccacgaccggctcccgcctgttccccaggcctggagcgccaccccgtgcagaccccggccagccctgcactccctcagtgcaccggcccccgcgcccagcaccctccccacccagcccggccgccgctccctccagcgcccccgcccgcaggcctggggcccgctccccaacatggcgacggggacacaagcgcggcgggcggggcggctccgggccgggcccgctctcagaccgtgccactcggtcgcccggcgccatttttccgcgcgggcccgggcggcgcctcctccccgcgaagccagcccgacaaggaccgcggacgcccggcgggcccaccccttacgggcccgcgccgccgtcccctcacctgagcgcggccccggccctcccgggcgggccttggagcgccggcccgggccgtgcgtgcccgccgccctcggtgcgtccgtccgtcagtcctcgcgtgcgcccgtctgtcccgccgcccgcgcccggccgcccgcagcccgacccggcagggcctcacggagccggcggggagggggatgggccggaccgggccggggagggagggggagggagggagagagggagggagcgcgagagggggcggggcggactcgaggggcggggcattgcccacgtgaccagacgtccccgggagcgcgaggtggagcgcgcgccagctcccttcggtgctgagtgcttagtgctgggatctcgtgggtctctgtcggctttccagggctattctctcgccagtgagtcccacttcggaagcacacattgcacagtcttttgcgagcgctctgagtatccttggacatggcaactccaagcctcagtttacccatctgaaatatggggaaaatcatagtgcttgtgaagagcaaatggaggtgggcttggaaagcacttgtcaccgtgcctgacacatactgtctaataataagcttaatgggatatagataaaagctttcattattatttgcctctaaatccctctcttctttttcccatcattacctccctagcaagctaaaatgctcagtaaatagaattattgatcgaacgagtgtggcccctcccctcttcccaaacgtagaaaggcctcctcagcactggacttcatgtctgtcatacaggcctggattcatatctggctttcactcttttttaaaaattttctgttttttcccacactacactgatgtattttttaaattttcgtaagtacgtagtaggtgaatatatttatggggtacatgagattttgatacaggcatgcgatgtgtaatcacatcatggtaaatggggtatctagcaactcaagcatttatcctttgtgttacaaataacccaattatactctagttattttaaaatgtacaagtaaattttgtgtgtgtgtggttttttttttgttttttgttttatttttgtttttttgagacggagtctcactccgtcgcccaggctggagtgcagtggcgcgatctcagctcactgcaacttccgcctccctggttcaaggga

SEQ ID NO: 442 - DNA, 3001 bp, homo sapiens
tttttttttaggattttgtgtttttttgtggtaaatatttagaagagaaggagtattttttttttttttttttttttagatagtgttttgttttgtcgtttaggtaggaatgttatggaatgattatagtatggtttattgtagttttgattttttaggtttaagcgatttttttattttagttttttgagtagttgggattataagtataagttatattaggtggttaattttttttattttttttgtagagatggggtttgttagtttttgggtttaagaaatttttttattttggttttttaaagtgttgggattataggcgtgagttattgtggttggtcggagtattttttaaaattttagaaagttagaaggttttaaagataatttttttgtataattagagatgaattaggaaatattaaataattggttgtttatatttttttgtattttttttagtttttgtattgttatatttattataggaagaaaataaatttaatagttatttggtatatattgttatgttttattttttgttgtttttgtttgtttgtttttagttttattataagaatgttatgttttattttttaatattttttttttagttagtaaatttttttaaggtaatgtgtttagtgaggaagtagtcgataatttttagtatttttttgttattaatttgtaagattttgaaaagttaattttatttttttatgttttagttaaaattattatttgatttgaaatttttatttgattttttaggtttttgtagtttttatatatttatttttttttattattttattggttttaataacgtttttttgatgatttttttaggtgattttgtttttaagttgtgggttgtttttttttagggaagatattttgggttatcgtttttaaatagttaggtttttttttttaaagatatatataattttttaagttgataaaggttttttttttttttgttaattagttttattttttgtgttttttttgttggttagtttttgtatttaaattttagtttttttttgtttttttttttttttattaaatatttttttttttttgttgttttttttaagagggggtggaggatgtttgggatataagtttttagagttttgggagttatatagttttgtaatttagttttagtattttaaggattgttttaatttgaattagcgtttgtatttaaagggtttttattttttattaattattttttttttttttagtaaagaattgttttagttttgatagtttgagtttggtttttatgtttttattttaatttttaggttttatttgtattagggttttaatatcgtttaaggtttaatttagttttacgttttgttatttttttagtttatagattttaatttcggtttttttcggatttagtgtttttttttcgcgattttgattacgattttacgatcggttttcgtttgttttttaggtttggagcgttatttcgtgtagatttcggttagttttgtatttttttagtgtatcggttttcgcgtttagtattttttttatttagttcggtcgtcgttttttttagcgttttcgttcgtaggtttggggttcgttttttaatatggcgacggggatataagcgcggcgggcggggcggtttcgggtcgggttcgtttttagatcgtgttattcggtcgttcggcgttattttttcgcgcgggttcgggcggcgtttttttttcgcgaagttagttcgataaggatcgcggacgttcggcgggtttattttttacgggttcgcgtcgtcgtttttttatttgagcgcggtttcggttttttcgggcgggttttggagcgtcggttcgggtcgtgcgtgttcgtcgttttcggtgcgttcgttcgttagttttcgcgtgcgttcgtttgtttcgtcgttcgcgttcggtcgttcgtagttcgattcggtagggttttacggagtcggcggggagggggatgggtcggatcgggtcggggagggagggggagggagggagagagggagggagcgcgagagggggcggggcggattcgaggggcggggtattgtttacgtgattagacgttttcgggagcgcgaggtggagcgcgcgttagtttttttcggtgttgagtgtttagtgttgggatttcgtgggtttttgtcggttttttagggttattttttcgttagtgagttttatttcggaagtatatattgtatagttttttgcgagcgttttgagtatttttggatatggtaattttaagttttagtttatttatttgaaatatggggaaaattatagtgtttgtgaagagtaaatggaggtgggtttggaaagtatttgttatcgtgtttgatatatattgtttaataataagtttaatgggatatagataaaagtttttattattatttgtttttaaatttttttttttttttttttattattatttttttagtaagttaaaatgtttagtaaatagaattattgatcgaacgagtgtggttttttttttttttttaaacgtagaaaggtttttttagtattggattttatgtttgttatataggtttggatttatatttggtttttatttttttttaaaaattttttgtttttttttatattatattgatgtattttttaaattttcgtaagtacgtagtaggtgaatatatttatggggtatatgagattttgatataggtatgcgatgtgtaattatattatggtaaatggggtatttagtaatttaagtatttattttttgtgttataaataatttaattatattttagttattttaaaatgtataagtaaattttgtgtgtgtgtggttttttttttgttttttgttttatttttgtttttttgagacggagttttatttcgtcgtttaggttggagtgtagtggcgcgattttagtttattgtaattttcgtttttttggtttaaggga

SEQ ID NO: 443 - DNA, 3001 bp, homo sapiens
tttttttttaggattttgtgtttttttgtggtaaatatttagaagagaaggagtattttttttttttttttttttttagatagtgttttgttttgttgtttaggtaggaatgttatggaatgattatagtatggtttattgtagttttgattttttaggtttaagtgatttttttattttagttttttgagtagttgggattataagtataagttatattaggtggttaattttttttattttttttgtagagatggggtttgttagtttttgggtttaagaaatttttttattttggttttttaaagtgttgggattataggtgtgagttattgtggttggttggagtattttttaaaattttagaaagttagaaggttttaaagataatttttttgtataattagagatgaattaggaaatattaaataattggttgtttatatttttttgtattttttttagtttttgtattgttatatttattataggaagaaaataaatttaatagttatttggtatatattgttatgttttattttttgttgtttttgtttgtttgtttttagttttattataagaatgttatgttttattttttaatattttttttttagttagtaaatttttttaaggtaatgtgtttagtgaggaagtagttgataatttttagtatttttttgttattaatttgtaagattttgaaaagttaattttatttttttatgttttagttaaaattattatttgatttgaaatttttatttgattttttaggtttttgtagtttttatatatttatttttttttattattttattggttttaataatgtttttttgatgatttttttaggtgattttgtttttaagttgtgggttgtttttttttagggaagatattttgggttattgtttttaaatagttaggtttttttttttaaagatatatataattttttaagttgataaaggttttttttttttttgttaattagttttattttttgtgttttttttgttggttagtttttgtatttaaattttagtttttttttgtttttttttttttttattaaatatttttttttttttgttgttttttttaagagggggtggaggatgtttgggatataagtttttagagttttgggagttatatagttttgtaatttagttttagtattttaaggattgttttaatttgaattagtgtttgtatttaaagggtttttattttttattaattattttttttttttttagtaaagaattgttttagttttgatagtttgagtttggtttttatgtttttattttaatttttaggttttatttgtattagggttttaatattgtttaaggtttaatttagttttatgttttgttatttttttagtttatagattttaattttggttttttttggatttagtgttttttttttgtgattttgattatgattttatgattggtttttgtttgttttttaggtttggagtgttattttgtgtagattttggttagttttgtatttttttagtgtattggtttttgtgtttagtattttttttatttagtttggttgttgttttttttagtgtttttgtttgtaggtttggggtttgttttttaatatggtgatggggatataagtgtggtgggtggggtggttttgggttgggtttgtttttagattgtgttatttggttgtttggtgttatttttttgtgtgggtttgggtggtgttttttttttgtgaagttagtttgataaggattgtggatgtttggtgggtttattttttatgggtttgtgttgttgtttttttatttgagtgtggttttggtttttttgggtgggttttggagtgttggtttgggttgtgtgtgtttgttgtttttggtgtgtttgtttgttagtttttgtgtgtgtttgtttgttttgttgtttgtgtttggttgtttgtagtttgatttggtagggttttatggagttggtggggagggggatgggttggattgggttggggagggagggggagggagggagagagggagggagtgtgagagggggtggggtggatttgaggggtggggtattgtttatgtgattagatgtttttgggagtgtgaggtggagtgtgtgttagttttttttggtgttgagtgtttagtgttgggattttgtgggtttttgttggttttttagggttatttttttgttagtgagttttattttggaagtatatattgtatagttttttgtgagtgttttgagtatttttggatatggtaattttaagttttagtttatttatttgaaatatggggaaaattatagtgtttgtgaagagtaaatggaggtgggtttggaaagtatttgttattgtgtttgatatatattgtttaataataagtttaatgggatatagataaaagtttttattattatttgtttttaaatttttttttttttttttttattattatttttttagtaagttaaaatgtttagtaaatagaattattgattgaatgagtgtggttttttttttttttttaaatgtagaaaggtttttttagtattggattttatgtttgttatataggtttggatttatatttggtttttatttttttttaaaaattttttgtttttttttatattatattgatgtattttttaaatttttgtaagtatgtagtaggtgaatatatttatggggtatatgagattttgatataggtatgtgatgtgtaattatattatggtaaatggggtatttagtaatttaagtatttattttttgtgttataaataatttaattatattttagttattttaaaatgtataagtaaattttgtgtgtgtgtggttttttttttgttttttgttttatttttgtttttttgagatggagttttattttgttgtttaggttggagtgtagtggtgtgattttagtttattgtaatttttgtttttttggtttaaggga

SEQ ID NO: 444 - DNA, 3001 bp, homo sapiens
ttttttgaattagggaggcggaagttgtagtgagttgagatcgcgttattgtattttagtttgggcgacggagtgagatttcgttttaaaaaaataaaaataaaataaaaaataaaaaaaaaattatatatatataaaatttatttgtatattttaaaataattagagtataattgggttatttgtaatataaaggataaatgtttgagttgttagatattttatttattatgatgtgattatatatcgtatgtttgtattaaaattttatgtattttataaatatatttatttattacgtatttacgaaaatttaaaaaatatattagtgtagtgtgggaaaaaatagaaaatttttaaaaaagagtgaaagttagatatgaatttaggtttgtatgatagatatgaagtttagtgttgaggaggtttttttacgtttgggaagaggggaggggttatattcgttcgattaataattttatttattgagtattttagtttgttagggaggtaatgatgggaaaaagaagagagggatttagaggtaaataataatgaaagtttttatttatattttattaagtttattattagatagtatgtgttaggtacggtgataagtgttttttaagtttatttttatttgttttttataagtattatgattttttttatattttagatgggtaaattgaggtttggagttgttatgtttaaggatatttagagcgttcgtaaaagattgtgtaatgtgtgttttcgaagtgggatttattggcgagagaatagttttggaaagtcgatagagatttacgagattttagtattaagtatttagtatcgaagggagttggcgcgcgttttatttcgcgttttcggggacgtttggttacgtgggtaatgtttcgtttttcgagttcgtttcgttttttttcgcgtttttttttttttttttttttttttttttttttttcggttcggttcggtttattttttttttcgtcggtttcgtgaggttttgtcgggtcgggttgcgggcggtcgggcgcgggcggcgggatagacgggcgtacgcgaggattgacggacggacgtatcgagggcggcgggtacgtacggttcgggtcggcgttttaaggttcgttcgggagggtcggggtcgcgtttaggtgaggggacggcggcgcgggttcgtaaggggtgggttcgtcgggcgttcgcggtttttgtcgggttggtttcgcggggaggaggcgtcgttcgggttcgcgcggaaaaatggcgtcgggcgatcgagtggtacggtttgagagcgggttcggttcggagtcgtttcgttcgtcgcgtttgtgttttcgtcgttatgttggggagcgggttttaggtttgcgggcgggggcgttggagggagcggcggtcgggttgggtggggagggtgttgggcgcgggggtcggtgtattgagggagtgtagggttggtcggggtttgtacggggtggcgttttaggtttggggaataggcgggagtcggtcgtggggtcgtggttagggtcgcggagaaggaatattgggttcgaagggaatcgggattggggtttatgggttgagaggatggtaggacgtggaattgggttaggttttaggcggtgttagagttttaatgtaggtaggatttggggattggggtggaggtatgggggttaagtttaggttgttagggttggagtagttttttgttgggagggaaggaggtgattgatgaggaatgagggttttttgggtatagacgttggtttagattggggtagtttttggggtattggggttgaattgtaaagttgtataatttttaaggttttgaagatttatgttttaagtattttttatttttttttgggggaagtaataggaaaaaggaggtgtttgatgagagaaaagggggataaagggagattgaggtttgggtgtaggagttggttagtaaaagaggtatagagagtggaattggttggtaaggaaggagagaatttttattaatttagggagttgtgtgtgtttttaaaaggagggatttggttgtttgggggcggtgatttaaggtgttttttttggaaggggatagtttatagtttaagagtagagttatttggagaggttattagaaaggcgttattgaagttagtaaaatggtgaagaagagtgaatgtataaaaattataaaggtttgagagattaagtaaagattttaaattaggtagtgattttagttgaaatatagaaaggtaaagttgattttttaagattttataagttagtggtagaggggtattagaaattgtcggttgtttttttattaaatatattgttttaaaggaatttgttagttgggagaaaggtgttaagaaatgaagtataatatttttgtgatgaaattaaaagtaaataaataaaaataataagaaatgaagtataatagtatatattagataattattaaatttgttttttttttgtaatgagtgtggtaatataaaggttgaagggaatataaaaaagtataggtagttagttatttggtattttttggtttatttttaattgtgtaaagaagttatttttgagattttttaattttttagagttttaagaggtgtttcggttagttatagtggtttacgtttgtaattttaatattttgggaggttaaggtgggaggattttttgagtttaggagttggtagattttatttttataaaagaaataaaaaaaattagttatttgatgtggtttgtatttgtagttttagttatttaggaggttgaggtgggaggatcgtttgagtttgggaggttaaggttgtaatgagttatgttatggttattttatgatatttttgtttgggcgatagagtaagatattgtttaaagaaaaaaaaaaaagagagatgtttttttttttttaggtgtttattataaaggaatataaaattttaaaaaagaa

SEQ ID NO: 445 - DNA, 3001 bp, homo sapiens
ttttttgaattagggaggtggaagttgtagtgagttgagattgtgttattgtattttagtttgggtgatggagtgagattttgttttaaaaaaataaaaataaaataaaaaataaaaaaaaaattatatatatataaaatttatttgtatattttaaaataattagagtataattgggttatttgtaatataaaggataaatgtttgagttgttagatattttatttattatgatgtgattatatattgtatgtttgtattaaaattttatgtattttataaatatatttatttattatgtatttatgaaaatttaaaaaatatattagtgtagtgtgggaaaaaatagaaaatttttaaaaaagagtgaaagttagatatgaatttaggtttgtatgatagatatgaagtttagtgttgaggaggtttttttatgtttgggaagaggggaggggttatatttgtttgattaataattttatttattgagtattttagtttgttagggaggtaatgatgggaaaaagaagagagggatttagaggtaaataataatgaaagtttttatttatattttattaagtttattattagatagtatgtgttaggtatggtgataagtgttttttaagtttatttttatttgttttttataagtattatgattttttttatattttagatgggtaaattgaggtttggagttgttatgtttaaggatatttagagtgtttgtaaaagattgtgtaatgtgtgtttttgaagtgggatttattggtgagagaatagttttggaaagttgatagagatttatgagattttagtattaagtatttagtattgaagggagttggtgtgtgttttattttgtgtttttggggatgtttggttatgtgggtaatgttttgttttttgagtttgttttgtttttttttgtgttttttttttttttttttttttttttttttttttttggtttggtttggtttatttttttttttgttggttttgtgaggttttgttgggttgggttgtgggtggttgggtgtgggtggtgggatagatgggtgtatgtgaggattgatggatggatgtattgagggtggtgggtatgtatggtttgggttggtgttttaaggtttgtttgggagggttggggttgtgtttaggtgaggggatggtggtgtgggtttgtaaggggtgggtttgttgggtgtttgtggtttttgttgggttggttttgtggggaggaggtgttgtttgggtttgtgtggaaaaatggtgttgggtgattgagtggtatggtttgagagtgggtttggtttggagttgttttgtttgttgtgtttgtgtttttgttgttatgttggggagtgggttttaggtttgtgggtgggggtgttggagggagtggtggttgggttgggtggggagggtgttgggtgtgggggttggtgtattgagggagtgtagggttggttggggtttgtatggggtggtgttttaggtttggggaataggtgggagttggttgtggggttgtggttagggttgtggagaaggaatattgggtttgaagggaattgggattggggtttatgggttgagaggatggtaggatgtggaattgggttaggttttaggtggtgttagagttttaatgtaggtaggatttggggattggggtggaggtatgggggttaagtttaggttgttagggttggagtagttttttgttgggagggaaggaggtgattgatgaggaatgagggttttttgggtatagatgttggtttagattggggtagtttttggggtattggggttgaattgtaaagttgtataatttttaaggttttgaagatttatgttttaagtattttttatttttttttgggggaagtaataggaaaaaggaggtgtttgatgagagaaaagggggataaagggagattgaggtttgggtgtaggagttggttagtaaaagaggtatagagagtggaattggttggtaaggaaggagagaatttttattaatttagggagttgtgtgtgtttttaaaaggagggatttggttgtttgggggtggtgatttaaggtgttttttttggaaggggatagtttatagtttaagagtagagttatttggagaggttattagaaaggtgttattgaagttagtaaaatggtgaagaagagtgaatgtataaaaattataaaggtttgagagattaagtaaagattttaaattaggtagtgattttagttgaaatatagaaaggtaaagttgattttttaagattttataagttagtggtagaggggtattagaaattgttggttgtttttttattaaatatattgttttaaaggaatttgttagttgggagaaaggtgttaagaaatgaagtataatatttttgtgatgaaattaaaagtaaataaataaaaataataagaaatgaagtataatagtatatattagataattattaaatttgttttttttttgtaatgagtgtggtaatataaaggttgaagggaatataaaaaagtataggtagttagttatttggtattttttggtttatttttaattgtgtaaagaagttatttttgagattttttaattttttagagttttaagaggtgttttggttagttatagtggtttatgtttgtaattttaatattttgggaggttaaggtgggaggattttttgagtttaggagttggtagattttatttttataaaagaaataaaaaaaattagttatttgatgtggtttgtatttgtagttttagttatttaggaggttgaggtgggaggattgtttgagtttgggaggttaaggttgtaatgagttatgttatggttattttatgatatttttgtttgggtgatagagtaagatattgtttaaagaaaaaaaaaaaagagagatgtttttttttttttaggtgtttattataaaggaatataaaattttaaaaaagaa

SEQ ID NO: 446 - DNA, 50 bp, homo sapiens
tgtcgtcagtcctaacctacacatttattcgttcaacaaatatttcagcg

SEQ ID NO: 447 - DNA, 50 bp, homo sapiens
tgtcgttagttttaatttatatatttattcgtttaataaatattttagcg

SEQ ID NO: 448 - DNA, 50 bp, homo sapiens
tgttgttagttttaatttatatatttatttgtttaataaatattttagtg

SEQ ID NO: 449 - DNA, 50 bp, homo sapiens
cgttgaaatatttgttgaacgaataaatgtgtaggttaggattgacgata

SEQ ID NO: 450 - DNA, 50 bp, homo sapiens
tgttgaaatatttgttgaatgaataaatgtgtaggttaggattgatgata

SEQ ID NO: 451 - DNA, 3001 bp, homo sapiens
cagctaatttttttgatttttttttttagtagagacaacgacttgccacgttgcccagggtggcctagaactcccgagctcaaggaatcctctgcctcccaaagtgctgggattacaggtgtgagtgagccactgtgccaggccccagggcatatctttacaagctgctttgaagtccatagccttaatacattattgaattatctggatctcagattttcagtcttttagggacaactatgctactgggtctccagccaaagccaccttgatgacaagaggaaaagagactaaatggaagaaatgacaatcaaatataagtctgtttgcagatcagcactatttaatggaaatgaaggccacatatataacttaaaattttctagtggtcacatttaaaaaaacaggtaaaattaattttaatagtatattttcttttttttttttttgagacaggatctcgttctgtcaacgcaggctggagtgcagtagtgagatgacgactcacggcagcctccacctcccactccagggatcctcctacctcagtctccggagtaactgggaccacaggcaggaactaccatgcccagctaatttttttttcttttttctttttttttttttttttttaactttttgtatagacgggggtttccctatattgcccaggctggtctctaactcctgcccaagcgatcctcccacctcagcctcctaaagtgctggatcacaggtgtgagacaccgtgcccggcttacattttctttactgcaatatatccaaaatatttcaacgtgcaatcaatataaaaagtgatcagtgaggtatttcacattcgtcgaactgacacccgtgcgtattttgcacttccagtgcctcctaaacgaactagcctcatttcaagtgctcagtggccctaagtggccaaggggctacactaatggacagggcaggtctaggtcctgtgtttttcccattcggagtcaccagtcctactagacattctgtgaaaaaagggaaagcctttgtgaaacttcctgaggactcacaaatgcacattattacatttagagtttagaactttggttaaggcagcgtcctgtatttgattctttccctcttcctctccgctaaccccctatgtgacaccgtagaacttataattcgttctaattcgcagatggagggcatatgagagaggaggctctgcctcaaacactttctcaaacttttgccgaggggtggcgagaaggtagacttccaggtcccacccgatatagattaagggctggaaacacagtcaaggggaaattatgaccaagacaacctttgctaaaatgccagcggtgactgccattgatgttcctataaaaggtcagctctgtcaggaagttccagtgcatcatttgttcaaaagtaaaatcagcccgtgttccagaattcgcggactgtcgtcagtcctaacctacacatttattcgttcaacaaatatttcagcgcctgggtcaggcatcaggaatacactggtggttaaaacagacggaaagctccatctggtgggacgcagtctgggagggaaagggagtcctggggacatgttttcgtcggctctaggctaagcacctctcgccgtagcacacggggtcggcaccgctgcccggcgaagtacttgttactttgcagtccagtacgaagcggcggagtaaccggttccaacccaaggcagcgactcatgcgagtcgttctaagcgccgcgctggggggtacatacggtgcacgcgtgggtgcctcaccccctggcagcgcctccagggacgctgctccgggaaagagcagccgccgcgacctcaggcggcgggaaaggtgggacctcacaatgcgccggaagcggtgcctcgtggcttgggatctctccgggttcttccttgcgccgtccacgccgcactgcccacgagggcgtccccgcccgagggacaactcaccgcccggggcctccctgagcgttcccttccaccatctgacacccactgctaagtgtgagaggacccagggggtaattgccgggccgcaggcggccttaggaactccgcttcccgtgaggcttcgcggcggacggcgctggtgcgcaggcgcacgcacggcgtgcgtggtggcgtcagcagttctagaacgttgctgtggtagcgctcgggcgccatgttaggacgaaggggaaggaggagaagcgcttaaagcggcgggagcggtgcgggagaggggttggacccagggctgaggcaggcccccccctccctcccgcctcagtggatcatgcccagggcggcagcggcggcggttgcgggggggaagtgactgggcggtgccggcgccggagacgatgccgttgtaagtaatttgtattctgttttctttcgctcgccggctgggccttggggggcgtccgggaaggggaagaggtaggcggagagggtggcacgcgagcccgaccctccccgctggtaggaggcaggcaggactggggaccttcctgtttcctcgctcgctcgccgccgcacttccccccgtgtgctgggttcccgcgtcccccgacccttcctggctgggtcagctgccgtcgggccgggggccttccccttccggaattgctggcggaacctctaactcgcccggccactccagcttctccgccccgtccacaaagaaaatcaaaacaacccgaaaacaaaacattgcctggtggtggggaaccacgaccctgctgcacgcgggatcagcacttggggttcgggctcgctctcggcgcccctcgggcccattcgatgttgcttttctgttcctggtctgtctcagtttgctcactctcttcctcccatttccagatgcctgtcttgtgcgccggagttagcccctttccactgaccttgtctgaatgtaggagcacgagttaaaagcccagctttgagcgttgagtccgcctgcctccacctccgcctcccta

SEQ ID NO: 452 - DNA, 3001 bp, homo sapiens
tagttaatttttttgatttttttttttagtagagataacgatttgttacgttgtttagggtggtttagaattttcgagtttaaggaattttttgttttttaaagtgttgggattataggtgtgagtgagttattgtgttaggttttagggtatatttttataagttgttttgaagtttatagttttaatatattattgaattatttggattttagatttttagttttttagggataattatgttattgggtttttagttaaagttattttgatgataagaggaaaagagattaaatggaagaaatgataattaaatataagtttgtttgtagattagtattatttaatggaaatgaaggttatatatataatttaaaattttttagtggttatatttaaaaaaataggtaaaattaattttaatagtatatttttttttttttttttttgagataggatttcgttttgttaacgtaggttggagtgtagtagtgagatgacgatttacggtagtttttattttttattttagggatttttttattttagttttcggagtaattgggattataggtaggaattattatgtttagttaattttttttttttttttttttttttttttttttttttaattttttgtatagacgggggtttttttatattgtttaggttggtttttaatttttgtttaagcgatttttttattttagttttttaaagtgttggattataggtgtgagatatcgtgttcggtttatattttttttattgtaatatatttaaaatattttaacgtgtaattaatataaaaagtgattagtgaggtattttatattcgtcgaattgatattcgtgcgtattttgtatttttagtgttttttaaacgaattagttttattttaagtgtttagtggttttaagtggttaaggggttatattaatggatagggtaggtttaggttttgtgttttttttattcggagttattagttttattagatattttgtgaaaaaagggaaagtttttgtgaaattttttgaggatttataaatgtatattattatatttagagtttagaattttggttaaggtagcgttttgtatttgatttttttttttttttttttcgttaattttttatgtgatatcgtagaatttataattcgttttaattcgtagatggagggtatatgagagaggaggttttgttttaaatatttttttaaatttttgtcgaggggtggcgagaaggtagatttttaggttttattcgatatagattaagggttggaaatatagttaaggggaaattatgattaagataatttttgttaaaatgttagcggtgattgttattgatgtttttataaaaggttagttttgttaggaagttttagtgtattatttgtttaaaagtaaaattagttcgtgttttagaattcgcggattgtcgttagttttaatttatatatttattcgtttaataaatattttagcgtttgggttaggtattaggaatatattggtggttaaaatagacggaaagttttatttggtgggacgtagtttgggagggaaagggagttttggggatatgttttcgtcggttttaggttaagtatttttcgtcgtagtatacggggtcggtatcgttgttcggcgaagtatttgttattttgtagtttagtacgaagcggcggagtaatcggttttaatttaaggtagcgatttatgcgagtcgttttaagcgtcgcgttggggggtatatacggtgtacgcgtgggtgttttattttttggtagcgtttttagggacgttgtttcgggaaagagtagtcgtcgcgattttaggcggcgggaaaggtgggattttataatgcgtcggaagcggtgtttcgtggtttgggattttttcgggtttttttttgcgtcgtttacgtcgtattgtttacgagggcgttttcgttcgagggataatttatcgttcggggtttttttgagcgtttttttttattatttgatatttattgttaagtgtgagaggatttagggggtaattgtcgggtcgtaggcggttttaggaatttcgtttttcgtgaggtttcgcggcggacggcgttggtgcgtaggcgtacgtacggcgtgcgtggtggcgttagtagttttagaacgttgttgtggtagcgttcgggcgttatgttaggacgaaggggaaggaggagaagcgtttaaagcggcgggagcggtgcgggagaggggttggatttagggttgaggtaggtttttttttttttttcgttttagtggattatgtttagggcggtagcggcggcggttgcgggggggaagtgattgggcggtgtcggcgtcggagacgatgtcgttgtaagtaatttgtattttgttttttttcgttcgtcggttgggttttggggggcgttcgggaaggggaagaggtaggcggagagggtggtacgcgagttcgatttttttcgttggtaggaggtaggtaggattggggatttttttgttttttcgttcgttcgtcgtcgtattttttttcgtgtgttgggttttcgcgtttttcgattttttttggttgggttagttgtcgtcgggtcgggggtttttttttttcggaattgttggcggaatttttaattcgttcggttattttagttttttcgtttcgtttataaagaaaattaaaataattcgaaaataaaatattgtttggtggtggggaattacgattttgttgtacgcgggattagtatttggggttcgggttcgttttcggcgtttttcgggtttattcgatgttgtttttttgtttttggtttgttttagtttgtttatttttttttttttatttttagatgtttgttttgtgcgtcggagttagtttttttttattgattttgtttgaatgtaggagtacgagttaaaagtttagttttgagcgttgagttcgtttgtttttattttcgttttttta

SEQ ID NO: 453 - DNA, 3001 bp, homo sapiens
tagttaatttttttgatttttttttttagtagagataatgatttgttatgttgtttagggtggtttagaatttttgagtttaaggaattttttgttttttaaagtgttgggattataggtgtgagtgagttattgtgttaggttttagggtatatttttataagttgttttgaagtttatagttttaatatattattgaattatttggattttagatttttagttttttagggataattatgttattgggtttttagttaaagttattttgatgataagaggaaaagagattaaatggaagaaatgataattaaatataagtttgtttgtagattagtattatttaatggaaatgaaggttatatatataatttaaaattttttagtggttatatttaaaaaaataggtaaaattaattttaatagtatatttttttttttttttttttgagataggattttgttttgttaatgtaggttggagtgtagtagtgagatgatgatttatggtagtttttattttttattttagggatttttttattttagtttttggagtaattgggattataggtaggaattattatgtttagttaattttttttttttttttttttttttttttttttttttaattttttgtatagatgggggtttttttatattgtttaggttggtttttaatttttgtttaagtgatttttttattttagttttttaaagtgttggattataggtgtgagatattgtgtttggtttatattttttttattgtaatatatttaaaatattttaatgtgtaattaatataaaaagtgattagtgaggtattttatatttgttgaattgatatttgtgtgtattttgtatttttagtgttttttaaatgaattagttttattttaagtgtttagtggttttaagtggttaaggggttatattaatggatagggtaggtttaggttttgtgttttttttatttggagttattagttttattagatattttgtgaaaaaagggaaagtttttgtgaaattttttgaggatttataaatgtatattattatatttagagtttagaattttggttaaggtagtgttttgtatttgattttttttttttttttttttgttaattttttatgtgatattgtagaatttataatttgttttaatttgtagatggagggtatatgagagaggaggttttgttttaaatatttttttaaatttttgttgaggggtggtgagaaggtagatttttaggttttatttgatatagattaagggttggaaatatagttaaggggaaattatgattaagataatttttgttaaaatgttagtggtgattgttattgatgtttttataaaaggttagttttgttaggaagttttagtgtattatttgtttaaaagtaaaattagtttgtgttttagaatttgtggattgttgttagttttaatttatatatttatttgtttaataaatattttagtgtttgggttaggtattaggaatatattggtggttaaaatagatggaaagttttatttggtgggatgtagtttgggagggaaagggagttttggggatatgtttttgttggttttaggttaagtattttttgttgtagtatatggggttggtattgttgtttggtgaagtatttgttattttgtagtttagtatgaagtggtggagtaattggttttaatttaaggtagtgatttatgtgagttgttttaagtgttgtgttggggggtatatatggtgtatgtgtgggtgttttattttttggtagtgtttttagggatgttgttttgggaaagagtagttgttgtgattttaggtggtgggaaaggtgggattttataatgtgttggaagtggtgttttgtggtttgggatttttttgggtttttttttgtgttgtttatgttgtattgtttatgagggtgtttttgtttgagggataatttattgtttggggtttttttgagtgtttttttttattatttgatatttattgttaagtgtgagaggatttagggggtaattgttgggttgtaggtggttttaggaattttgttttttgtgaggttttgtggtggatggtgttggtgtgtaggtgtatgtatggtgtgtgtggtggtgttagtagttttagaatgttgttgtggtagtgtttgggtgttatgttaggatgaaggggaaggaggagaagtgtttaaagtggtgggagtggtgtgggagaggggttggatttagggttgaggtaggttttttttttttttttgttttagtggattatgtttagggtggtagtggtggtggttgtgggggggaagtgattgggtggtgttggtgttggagatgatgttgttgtaagtaatttgtattttgtttttttttgtttgttggttgggttttggggggtgtttgggaaggggaagaggtaggtggagagggtggtatgtgagtttgattttttttgttggtaggaggtaggtaggattggggatttttttgtttttttgtttgtttgttgttgtatttttttttgtgtgttgggtttttgtgttttttgattttttttggttgggttagttgttgttgggttgggggttttttttttttggaattgttggtggaatttttaatttgtttggttattttagtttttttgttttgtttataaagaaaattaaaataatttgaaaataaaatattgtttggtggtggggaattatgattttgttgtatgtgggattagtatttggggtttgggtttgtttttggtgttttttgggtttatttgatgttgtttttttgtttttggtttgttttagtttgtttatttttttttttttatttttagatgtttgttttgtgtgttggagttagtttttttttattgattttgtttgaatgtaggagtatgagttaaaagtttagttttgagtgttgagtttgtttgtttttatttttgttttttta

SEQ ID NO: 454 - DNA, 3001 bp, homo sapiens
tagggaggcggaggtggaggtaggcggatttaacgtttaaagttgggtttttaattcgtgtttttatatttagataaggttagtggaaaggggttaatttcggcgtataagataggtatttggaaatgggaggaagagagtgagtaaattgagatagattaggaatagaaaagtaatatcgaatgggttcgaggggcgtcgagagcgagttcgaattttaagtgttgatttcgcgtgtagtagggtcgtggttttttattattaggtaatgttttgttttcgggttgttttgattttttttgtggacggggcggagaagttggagtggtcgggcgagttagaggtttcgttagtaatttcggaaggggaaggttttcggttcgacggtagttgatttagttaggaagggtcgggggacgcgggaatttagtatacggggggaagtgcggcggcgagcgagcgaggaaataggaaggtttttagttttgtttgttttttattagcggggagggtcgggttcgcgtgttatttttttcgtttattttttttttttttcggacgttttttaaggtttagtcggcgagcgaaagaaaatagaatataaattatttataacggtatcgttttcggcgtcggtatcgtttagttatttttttttcgtaatcgtcgtcgttgtcgttttgggtatgatttattgaggcgggagggaggggggggtttgttttagttttgggtttaatttttttttcgtatcgttttcgtcgttttaagcgttttttttttttttttttcgttttaatatggcgttcgagcgttattatagtaacgttttagaattgttgacgttattacgtacgtcgtgcgtgcgtttgcgtattagcgtcgttcgtcgcgaagttttacgggaagcggagtttttaaggtcgtttgcggttcggtaattattttttgggtttttttatatttagtagtgggtgttagatggtggaagggaacgtttagggaggtttcgggcggtgagttgtttttcgggcggggacgttttcgtgggtagtgcggcgtggacggcgtaaggaagaattcggagagattttaagttacgaggtatcgttttcggcgtattgtgaggttttatttttttcgtcgtttgaggtcgcggcggttgttttttttcggagtagcgtttttggaggcgttgttagggggtgaggtatttacgcgtgtatcgtatgtattttttagcgcggcgtttagaacgattcgtatgagtcgttgttttgggttggaatcggttatttcgtcgtttcgtattggattgtaaagtaataagtatttcgtcgggtagcggtgtcgatttcgtgtgttacggcgagaggtgtttagtttagagtcgacgaaaatatgtttttaggatttttttttttttttagattgcgttttattagatggagtttttcgtttgttttaattattagtgtatttttgatgtttgatttaggcgttgaaatatttgttgaacgaataaatgtgtaggttaggattgacgatagttcgcgaattttggaatacgggttgattttatttttgaataaatgatgtattggaattttttgatagagttgattttttataggaatattaatggtagttatcgttggtattttagtaaaggttgttttggttataatttttttttgattgtgtttttagtttttaatttatatcgggtgggatttggaagtttattttttcgttatttttcggtaaaagtttgagaaagtgtttgaggtagagtttttttttttatatgttttttatttgcgaattagaacgaattataagttttacggtgttatatagggggttagcggagaggaagagggaaagaattaaatataggacgttgttttaattaaagttttaaattttaaatgtaataatgtgtatttgtgagtttttaggaagttttataaaggttttttttttttttatagaatgtttagtaggattggtgatttcgaatgggaaaaatataggatttagatttgttttgtttattagtgtagttttttggttatttagggttattgagtatttgaaatgaggttagttcgtttaggaggtattggaagtgtaaaatacgtacgggtgttagttcgacgaatgtgaaatattttattgattattttttatattgattgtacgttgaaatattttggatatattgtagtaaagaaaatgtaagtcgggtacggtgttttatatttgtgatttagtattttaggaggttgaggtgggaggatcgtttgggtaggagttagagattagtttgggtaatatagggaaattttcgtttatataaaaagttaaaaaaaaaaaaaaaaaaagaaaaaagaaaaaaaaattagttgggtatggtagtttttgtttgtggttttagttatttcggagattgaggtaggaggatttttggagtgggaggtggaggttgtcgtgagtcgttattttattattgtattttagtttgcgttgatagaacgagattttgttttaaaaaaaaaaaaaagaaaatatattattaaaattaattttatttgtttttttaaatgtgattattagaaaattttaagttatatatgtggtttttatttttattaaatagtgttgatttgtaaatagatttatatttgattgttattttttttatttagttttttttttttttgttattaaggtggttttggttggagatttagtagtatagttgtttttaaaagattgaaaatttgagatttagataatttaataatgtattaaggttatggattttaaagtagtttgtaaagatatgttttggggtttggtatagtggtttatttatatttgtaattttagtattttgggaggtagaggattttttgagttcgggagttttaggttattttgggtaacgtggtaagtcgttgtttttattaaaaaaaaaaattaaaaaaattagttg

SEQ ID NO: 455 - DNA, 3001 bp, homo sapiens
tagggaggtggaggtggaggtaggtggatttaatgtttaaagttgggtttttaatttgtgtttttatatttagataaggttagtggaaaggggttaattttggtgtataagataggtatttggaaatgggaggaagagagtgagtaaattgagatagattaggaatagaaaagtaatattgaatgggtttgaggggtgttgagagtgagtttgaattttaagtgttgattttgtgtgtagtagggttgtggttttttattattaggtaatgttttgtttttgggttgttttgattttttttgtggatggggtggagaagttggagtggttgggtgagttagaggttttgttagtaattttggaaggggaaggtttttggtttgatggtagttgatttagttaggaagggttgggggatgtgggaatttagtatatggggggaagtgtggtggtgagtgagtgaggaaataggaaggtttttagttttgtttgttttttattagtggggagggttgggtttgtgtgttattttttttgtttatttttttttttttttggatgttttttaaggtttagttggtgagtgaaagaaaatagaatataaattatttataatggtattgtttttggtgttggtattgtttagttattttttttttgtaattgttgttgttgttgttttgggtatgatttattgaggtgggagggaggggggggtttgttttagttttgggtttaattttttttttgtattgtttttgttgttttaagtgtttttttttttttttttttgttttaatatggtgtttgagtgttattatagtaatgttttagaattgttgatgttattatgtatgttgtgtgtgtgtttgtgtattagtgttgtttgttgtgaagttttatgggaagtggagtttttaaggttgtttgtggtttggtaattattttttgggtttttttatatttagtagtgggtgttagatggtggaagggaatgtttagggaggttttgggtggtgagttgttttttgggtggggatgtttttgtgggtagtgtggtgtggatggtgtaaggaagaatttggagagattttaagttatgaggtattgtttttggtgtattgtgaggttttattttttttgttgtttgaggttgtggtggttgtttttttttggagtagtgtttttggaggtgttgttagggggtgaggtatttatgtgtgtattgtatgtattttttagtgtggtgtttagaatgatttgtatgagttgttgttttgggttggaattggttattttgttgttttgtattggattgtaaagtaataagtattttgttgggtagtggtgttgattttgtgtgttatggtgagaggtgtttagtttagagttgatgaaaatatgtttttaggatttttttttttttttagattgtgttttattagatggagttttttgtttgttttaattattagtgtatttttgatgtttgatttaggtgttgaaatatttgttgaatgaataaatgtgtaggttaggattgatgatagtttgtgaattttggaatatgggttgattttatttttgaataaatgatgtattggaattttttgatagagttgattttttataggaatattaatggtagttattgttggtattttagtaaaggttgttttggttataatttttttttgattgtgtttttagtttttaatttatattgggtgggatttggaagtttatttttttgttattttttggtaaaagtttgagaaagtgtttgaggtagagtttttttttttatatgttttttatttgtgaattagaatgaattataagttttatggtgttatatagggggttagtggagaggaagagggaaagaattaaatataggatgttgttttaattaaagttttaaattttaaatgtaataatgtgtatttgtgagtttttaggaagttttataaaggttttttttttttttatagaatgtttagtaggattggtgattttgaatgggaaaaatataggatttagatttgttttgtttattagtgtagttttttggttatttagggttattgagtatttgaaatgaggttagtttgtttaggaggtattggaagtgtaaaatatgtatgggtgttagtttgatgaatgtgaaatattttattgattattttttatattgattgtatgttgaaatattttggatatattgtagtaaagaaaatgtaagttgggtatggtgttttatatttgtgatttagtattttaggaggttgaggtgggaggattgtttgggtaggagttagagattagtttgggtaatatagggaaatttttgtttatataaaaagttaaaaaaaaaaaaaaaaaaagaaaaaagaaaaaaaaattagttgggtatggtagtttttgtttgtggttttagttattttggagattgaggtaggaggatttttggagtgggaggtggaggttgttgtgagttgttattttattattgtattttagtttgtgttgatagaatgagattttgttttaaaaaaaaaaaaaagaaaatatattattaaaattaattttatttgtttttttaaatgtgattattagaaaattttaagttatatatgtggtttttatttttattaaatagtgttgatttgtaaatagatttatatttgattgttattttttttatttagttttttttttttttgttattaaggtggttttggttggagatttagtagtatagttgtttttaaaagattgaaaatttgagatttagataatttaataatgtattaaggttatggattttaaagtagtttgtaaagatatgttttggggtttggtatagtggtttatttatatttgtaattttagtattttgggaggtagaggattttttgagtttgggagttttaggttattttgggtaatgtggtaagttgttgtttttattaaaaaaaaaaattaaaaaaattagttg

SEQ ID NO: 456 - DNA, 50 bp, homo sapiens
tcgccttgggcgcagggtttggggctcagctgtcaattccaaggaattcg

SEQ ID NO: 457 - DNA, 50 bp, homo sapiens
tcgttttgggcgtagggtttggggtttagttgttaattttaaggaattcg

SEQ ID NO: 458 - DNA, 50 bp, homo sapiens
ttgttttgggtgtagggtttggggtttagttgttaattttaaggaatttg

SEQ ID NO: 459 - DNA, 50 bp, homo sapiens
cgaattttttggaattgatagttgagttttaaattttgcgtttaaggcga

SEQ ID NO: 460 - DNA, 50 bp, homo sapiens
tgaattttttggaattgatagttgagttttaaattttgtgtttaaggtga

SEQ ID NO: 461 - DNA, 3001 bp, homo sapiens
accgatctcgaaggatcttagaacgacactgggagagcgcggcaagaactagccccaccttcccccgacgccccggactgactgccgggcgcagacccgacttctcccgaaccagcctcggaccagccttagaaggcggaaaacaggattcaaacccgcctatgagcagtggtaggggcgggggctgtgggggcaggactcggtttaaggaaccaaccgcctcggttcgagggcctcctgtccggaggttgctcctgaccactgggtttattttgcttttgcagaggaggcagatgttgacctctcttctttgcacagtctctccgcaaaattttcccccaaccatttgctttcttgcgccaccccccaccggggcactatccctggagtcagctcctcaggcctttaaaccttccagaatgtcacacatggaaacctttagcaaatgtttgttaatgatcataacaaaggcatcattcaaattaggcaggtaattactaccagaaggacaactgggtgctcgcttgctcatccattgctttctgctttaaactcccgaggagtcgctgcctggagacactcccgcccggactgcttctcgggccccattaaacggctctgaaatgaactgtgaagttaccatttgtgggcggagagcgctggggccctgcggacggaagaccctggcttgaccggactaacagtgtcgccgaagcaaagcagcccctctgggtaggctgtctgtctcgcctcctaccctctggggcaactagcctaaaaacccggttctcaacttaacagcatgtggcccagcacccgcttttgccttttattccgcactctgatttttggggggatcgtttgttcccgctcattttctacaaacattacggtatcctgttagcattccgaacaaggggctgttcatatatttgccttcaatgatttcctgaagggacatgtggaagtaatagcgagcggtgcagtcacccaagctgaagatgcacgagagcgggtcgcgtagaagaactgcggcaatgggacccccagcgcagccccaggcgccctgttttcgaggctgacatcccaagatcctgtcctggttaggcacagcaccgcgcccgttggagtacttctctgtgactctcccctgtccactgcactgtgtccaccctcctggtgaaggaggagacggctgttggacatgccagtcccaacctggccactttggccattttcagagtgcgtgtgttggggtggggttgagggagaaggatgaaggatgacccccaaccccaacaggagaattcaaaaatcagagagcgatgaaggtgaacgcgctcccctcccccgctgtcgctgggaagccccactctgcccaggtctggttcctggagcatcagcgccccctttccctcgccggcaggatcgtttcctcccgacactggcctctcgccttgggcgcagggtttggggctcagctgtcaattccaaggaattcgtagggttcgacccacgcggcgggagggaacggagggagaatcaaaaggcatcctcccccacgacgcggaggcggtggtacgattcctcaaacgcccaagcttgagctttttttgtatgcgagatagaagccagggcaacctcgcccagataaccccgaaaacaaaggcacgaccagataagtgacttcaagggagtaaaggtcgttctatcggagaacgttccaaacctacacagaccctcttttctttgtaccgtatttcagaccacccagtcttgtacacacacacacaccacacaaaacaaaaacccatcattgtcatattggactcaacagtttgcccaatcctattaaataactagcaactatatagcccttcccctaaaagacccctagttcaaaacggcgcaaccgcttggagatttctcccgagggccctatttctcgttgggccgagtttgtagaagggacatttcttgattctagatttatattctctctgggtattaaatgcaattttgtatgttccttttcttcttttcaaagagaatacaaaactatagcagtctaagaaaataaccccaaaatggggaggcaaactcattctggaaatgatgggctgtttgtagtttcacaaaacctctttcccggcagagcaccaacacctcccccttccaccaccccccatcccatctggtctgcttctccccgccccccagttgttgtcgaagtctgggggttgggactggaccccctgattgcgtaagagcaaaaagcgaaggcgcaatctggacactgggagattcggagcgcagggagtttgagagaaacttttattttgaagagaccaaggttgagggggggcttatttcctgacagctatttacttagagcaaatgattagttttagaaggatggactataacattgaatcaattacaaaacgcggtttttgagcccattactgttggagctacagggagagaaacagaggaggagactgcaagagatcattggaggccgtgggcacgctctttactccatgtgtgggacattcattgcggaataacatcggaggagaaggtaagggaaaagaaaaaatgattttttgtttataagggaagtccctgatcagactctgggactggagaaagcgaagtaacttcaaactttgggcgacaagaaaaaaaaaaaggagctggattccagttgtgtgtccagagagtaatttttttttttcggaataaacttcacttggggacgggtgggagataaccatagagttagaaagtctaggtattttttttaaacacacattttccagacctatttttaaaaacaatgtttttctaacaaccctatggcctcccaaagaaattgtttaggcttacatttttgaggtttcttttgggagtgggggtggtgttcgtgaatactgggccgaacaccaaggaactgggggtggaggcagaggtgtttgccctcttcttggcagtgggt

SEQ ID NO: 462 - DNA, 3001 bp, homo sapiens
atcgatttcgaaggattttagaacgatattgggagagcgcggtaagaattagttttattttttttcgacgtttcggattgattgtcgggcgtagattcgatttttttcgaattagtttcggattagttttagaaggcggaaaataggatttaaattcgtttatgagtagtggtaggggcgggggttgtgggggtaggattcggtttaaggaattaatcgtttcggttcgagggttttttgttcggaggttgtttttgattattgggtttattttgtttttgtagaggaggtagatgttgattttttttttttgtatagttttttcgtaaaatttttttttaattatttgtttttttgcgttattttttatcggggtattatttttggagttagttttttaggtttttaaattttttagaatgttatatatggaaatttttagtaaatgtttgttaatgattataataaaggtattatttaaattaggtaggtaattattattagaaggataattgggtgttcgtttgtttatttattgttttttgttttaaattttcgaggagtcgttgtttggagatattttcgttcggattgtttttcgggttttattaaacggttttgaaatgaattgtgaagttattatttgtgggcggagagcgttggggttttgcggacggaagattttggtttgatcggattaatagtgtcgtcgaagtaaagtagtttttttgggtaggttgtttgtttcgttttttattttttggggtaattagtttaaaaattcggtttttaatttaatagtatgtggtttagtattcgtttttgttttttatttcgtattttgatttttggggggatcgtttgttttcgtttattttttataaatattacggtattttgttagtatttcgaataaggggttgtttatatatttgtttttaatgattttttgaagggatatgtggaagtaatagcgagcggtgtagttatttaagttgaagatgtacgagagcgggtcgcgtagaagaattgcggtaatgggatttttagcgtagttttaggcgttttgttttcgaggttgatattttaagattttgttttggttaggtatagtatcgcgttcgttggagtatttttttgtgatttttttttgtttattgtattgtgtttatttttttggtgaaggaggagacggttgttggatatgttagttttaatttggttattttggttatttttagagtgcgtgtgttggggtggggttgagggagaaggatgaaggatgatttttaattttaataggagaatttaaaaattagagagcgatgaaggtgaacgcgtttttttttttcgttgtcgttgggaagttttattttgtttaggtttggtttttggagtattagcgttttttttttttcgtcggtaggatcgttttttttcgatattggtttttcgttttgggcgtagggtttggggtttagttgttaattttaaggaattcgtagggttcgatttacgcggcgggagggaacggagggagaattaaaaggtatttttttttacgacgcggaggcggtggtacgattttttaaacgtttaagtttgagttttttttgtatgcgagatagaagttagggtaatttcgtttagataatttcgaaaataaaggtacgattagataagtgattttaagggagtaaaggtcgttttatcggagaacgttttaaatttatatagatttttttttttttgtatcgtattttagattatttagttttgtatatatatatatattatataaaataaaaatttattattgttatattggatttaatagtttgtttaattttattaaataattagtaattatatagttttttttttaaaagatttttagtttaaaacggcgtaatcgtttggagatttttttcgagggttttatttttcgttgggtcgagtttgtagaagggatattttttgattttagatttatattttttttgggtattaaatgtaattttgtatgtttttttttttttttttaaagagaatataaaattatagtagtttaagaaaataattttaaaatggggaggtaaatttattttggaaatgatgggttgtttgtagttttataaaatttttttttcggtagagtattaatattttttttttttattattttttattttatttggtttgttttttttcgttttttagttgttgtcgaagtttgggggttgggattggattttttgattgcgtaagagtaaaaagcgaaggcgtaatttggatattgggagattcggagcgtagggagtttgagagaaatttttattttgaagagattaaggttgagggggggtttattttttgatagttatttatttagagtaaatgattagttttagaaggatggattataatattgaattaattataaaacgcggtttttgagtttattattgttggagttatagggagagaaatagaggaggagattgtaagagattattggaggtcgtgggtacgttttttattttatgtgtgggatatttattgcggaataatatcggaggagaaggtaagggaaaagaaaaaatgattttttgtttataagggaagtttttgattagattttgggattggagaaagcgaagtaattttaaattttgggcgataagaaaaaaaaaaaggagttggattttagttgtgtgtttagagagtaatttttttttttcggaataaattttatttggggacgggtgggagataattatagagttagaaagtttaggtattttttttaaatatatattttttagatttatttttaaaaataatgtttttttaataattttatggttttttaaagaaattgtttaggtttatatttttgaggttttttttgggagtgggggtggtgttcgtgaatattgggtcgaatattaaggaattgggggtggaggtagaggtgtttgttttttttttggtagtgggt

SEQ ID NO: 463 - DNA, 3001 bp, homo sapiens
attgattttgaaggattttagaatgatattgggagagtgtggtaagaattagttttatttttttttgatgttttggattgattgttgggtgtagatttgattttttttgaattagttttggattagttttagaaggtggaaaataggatttaaatttgtttatgagtagtggtaggggtgggggttgtgggggtaggatttggtttaaggaattaattgttttggtttgagggttttttgtttggaggttgtttttgattattgggtttattttgtttttgtagaggaggtagatgttgattttttttttttgtatagtttttttgtaaaatttttttttaattatttgtttttttgtgttattttttattggggtattatttttggagttagttttttaggtttttaaattttttagaatgttatatatggaaatttttagtaaatgtttgttaatgattataataaaggtattatttaaattaggtaggtaattattattagaaggataattgggtgtttgtttgtttatttattgttttttgttttaaatttttgaggagttgttgtttggagatatttttgtttggattgttttttgggttttattaaatggttttgaaatgaattgtgaagttattatttgtgggtggagagtgttggggttttgtggatggaagattttggtttgattggattaatagtgttgttgaagtaaagtagtttttttgggtaggttgtttgttttgttttttattttttggggtaattagtttaaaaatttggtttttaatttaatagtatgtggtttagtatttgtttttgttttttattttgtattttgatttttggggggattgtttgtttttgtttattttttataaatattatggtattttgttagtattttgaataaggggttgtttatatatttgtttttaatgattttttgaagggatatgtggaagtaatagtgagtggtgtagttatttaagttgaagatgtatgagagtgggttgtgtagaagaattgtggtaatgggatttttagtgtagttttaggtgttttgtttttgaggttgatattttaagattttgttttggttaggtatagtattgtgtttgttggagtatttttttgtgatttttttttgtttattgtattgtgtttatttttttggtgaaggaggagatggttgttggatatgttagttttaatttggttattttggttatttttagagtgtgtgtgttggggtggggttgagggagaaggatgaaggatgatttttaattttaataggagaatttaaaaattagagagtgatgaaggtgaatgtgttttttttttttgttgttgttgggaagttttattttgtttaggtttggtttttggagtattagtgtttttttttttttgttggtaggattgtttttttttgatattggttttttgttttgggtgtagggtttggggtttagttgttaattttaaggaatttgtagggtttgatttatgtggtgggagggaatggagggagaattaaaaggtatttttttttatgatgtggaggtggtggtatgattttttaaatgtttaagtttgagttttttttgtatgtgagatagaagttagggtaattttgtttagataattttgaaaataaaggtatgattagataagtgattttaagggagtaaaggttgttttattggagaatgttttaaatttatatagatttttttttttttgtattgtattttagattatttagttttgtatatatatatatattatataaaataaaaatttattattgttatattggatttaatagtttgtttaattttattaaataattagtaattatatagttttttttttaaaagatttttagtttaaaatggtgtaattgtttggagattttttttgagggttttattttttgttgggttgagtttgtagaagggatattttttgattttagatttatattttttttgggtattaaatgtaattttgtatgtttttttttttttttttaaagagaatataaaattatagtagtttaagaaaataattttaaaatggggaggtaaatttattttggaaatgatgggttgtttgtagttttataaaattttttttttggtagagtattaatattttttttttttattattttttattttatttggtttgtttttttttgttttttagttgttgttgaagtttgggggttgggattggattttttgattgtgtaagagtaaaaagtgaaggtgtaatttggatattgggagatttggagtgtagggagtttgagagaaatttttattttgaagagattaaggttgagggggggtttattttttgatagttatttatttagagtaaatgattagttttagaaggatggattataatattgaattaattataaaatgtggtttttgagtttattattgttggagttatagggagagaaatagaggaggagattgtaagagattattggaggttgtgggtatgttttttattttatgtgtgggatatttattgtggaataatattggaggagaaggtaagggaaaagaaaaaatgattttttgtttataagggaagtttttgattagattttgggattggagaaagtgaagtaattttaaattttgggtgataagaaaaaaaaaaaggagttggattttagttgtgtgtttagagagtaattttttttttttggaataaattttatttggggatgggtgggagataattatagagttagaaagtttaggtattttttttaaatatatattttttagatttatttttaaaaataatgtttttttaataattttatggttttttaaagaaattgtttaggtttatatttttgaggttttttttgggagtgggggtggtgtttgtgaatattgggttgaatattaaggaattgggggtggaggtagaggtgtttgttttttttttggtagtgggt

SEQ ID NO: 464 - DNA, 3001 bp, homo sapiens
atttattgttaagaagagggtaaatatttttgtttttatttttagttttttggtgttcggtttagtatttacgaatattatttttatttttaaaagaaattttaaaaatgtaagtttaaataatttttttgggaggttatagggttgttagaaaaatattgtttttaaaaataggtttggaaaatgtgtgtttaaaaaaaatatttagattttttaattttatggttattttttattcgtttttaagtgaagtttatttcgaaaaaaaaaaattattttttggatatataattggaatttagttttttttttttttttttgtcgtttaaagtttgaagttatttcgttttttttagttttagagtttgattagggattttttttataaataaaaaattattttttttttttttttattttttttttcgatgttatttcgtaatgaatgttttatatatggagtaaagagcgtgtttacggtttttaatgattttttgtagtttttttttttgtttttttttttgtagttttaatagtaatgggtttaaaaatcgcgttttgtaattgatttaatgttatagtttatttttttaaaattaattatttgttttaagtaaatagttgttaggaaataagtttttttttaattttggtttttttaaaataaaagttttttttaaattttttgcgtttcgaattttttagtgtttagattgcgttttcgttttttgtttttacgtaattagggggtttagttttaatttttagatttcgataataattggggggcggggagaagtagattagatgggatggggggtggtggaagggggaggtgttggtgttttgtcgggaaagaggttttgtgaaattataaatagtttattatttttagaatgagtttgtttttttattttggggttatttttttagattgttatagttttgtattttttttgaaaagaagaaaaggaatatataaaattgtatttaatatttagagagaatataaatttagaattaagaaatgttttttttataaattcggtttaacgagaaatagggttttcgggagaaatttttaagcggttgcgtcgttttgaattaggggttttttaggggaagggttatatagttgttagttatttaataggattgggtaaattgttgagtttaatatgataatgatgggtttttgttttgtgtggtgtgtgtgtgtgtataagattgggtggtttgaaatacggtataaagaaaagagggtttgtgtaggtttggaacgtttttcgatagaacgatttttatttttttgaagttatttatttggtcgtgtttttgttttcggggttatttgggcgaggttgttttggtttttatttcgtatataaaaaaagtttaagtttgggcgtttgaggaatcgtattatcgttttcgcgtcgtgggggaggatgttttttgatttttttttcgttttttttcgtcgcgtgggtcgaattttacgaattttttggaattgatagttgagttttaaattttgcgtttaaggcgagaggttagtgtcgggaggaaacgattttgtcggcgagggaaagggggcgttgatgttttaggaattagatttgggtagagtggggttttttagcgatagcgggggaggggagcgcgtttatttttatcgttttttgatttttgaatttttttgttggggttgggggttattttttattttttttttttaattttattttaatatacgtattttgaaaatggttaaagtggttaggttgggattggtatgtttaatagtcgtttttttttttattaggagggtggatatagtgtagtggataggggagagttatagagaagtattttaacgggcgcggtgttgtgtttaattaggataggattttgggatgttagtttcgaaaatagggcgtttggggttgcgttgggggttttattgtcgtagtttttttacgcgattcgttttcgtgtatttttagtttgggtgattgtatcgttcgttattatttttatatgtttttttaggaaattattgaaggtaaatatatgaatagttttttgttcggaatgttaataggatatcgtaatgtttgtagaaaatgagcgggaataaacgatttttttaaaaattagagtgcggaataaaaggtaaaagcgggtgttgggttatatgttgttaagttgagaatcgggtttttaggttagttgttttagagggtaggaggcgagatagatagtttatttagaggggttgttttgtttcggcgatattgttagttcggttaagttagggtttttcgttcgtagggttttagcgtttttcgtttataaatggtaattttatagtttattttagagtcgtttaatggggttcgagaagtagttcgggcgggagtgtttttaggtagcgatttttcgggagtttaaagtagaaagtaatggatgagtaagcgagtatttagttgtttttttggtagtaattatttgtttaatttgaatgatgtttttgttatgattattaataaatatttgttaaaggtttttatgtgtgatattttggaaggtttaaaggtttgaggagttgattttagggatagtgtttcggtggggggtggcgtaagaaagtaaatggttgggggaaaattttgcggagagattgtgtaaagaagagaggttaatatttgttttttttgtaaaagtaaaataaatttagtggttaggagtaattttcggataggaggttttcgaatcgaggcggttggttttttaaatcgagttttgtttttatagttttcgtttttattattgtttataggcgggtttgaattttgtttttcgttttttaaggttggttcgaggttggttcgggagaagtcgggtttgcgttcggtagttagttcggggcgtcgggggaaggtggggttagtttttgtcgcgtttttttagtgtcgttttaagatttttcgagatcggt

SEQ ID NO: 465 - DNA, 3001 bp, homo sapiens
atttattgttaagaagagggtaaatatttttgtttttatttttagttttttggtgtttggtttagtatttatgaatattatttttatttttaaaagaaattttaaaaatgtaagtttaaataatttttttgggaggttatagggttgttagaaaaatattgtttttaaaaataggtttggaaaatgtgtgtttaaaaaaaatatttagattttttaattttatggttattttttatttgtttttaagtgaagtttattttgaaaaaaaaaaattattttttggatatataattggaatttagttttttttttttttttttgttgtttaaagtttgaagttattttgttttttttagttttagagtttgattagggattttttttataaataaaaaattattttttttttttttttatttttttttttgatgttattttgtaatgaatgttttatatatggagtaaagagtgtgtttatggtttttaatgattttttgtagtttttttttttgtttttttttttgtagttttaatagtaatgggtttaaaaattgtgttttgtaattgatttaatgttatagtttatttttttaaaattaattatttgttttaagtaaatagttgttaggaaataagtttttttttaattttggtttttttaaaataaaagttttttttaaattttttgtgttttgaattttttagtgtttagattgtgtttttgttttttgtttttatgtaattagggggtttagttttaatttttagattttgataataattggggggtggggagaagtagattagatgggatggggggtggtggaagggggaggtgttggtgttttgttgggaaagaggttttgtgaaattataaatagtttattatttttagaatgagtttgtttttttattttggggttatttttttagattgttatagttttgtattttttttgaaaagaagaaaaggaatatataaaattgtatttaatatttagagagaatataaatttagaattaagaaatgttttttttataaatttggtttaatgagaaatagggtttttgggagaaatttttaagtggttgtgttgttttgaattaggggttttttaggggaagggttatatagttgttagttatttaataggattgggtaaattgttgagtttaatatgataatgatgggtttttgttttgtgtggtgtgtgtgtgtgtataagattgggtggtttgaaatatggtataaagaaaagagggtttgtgtaggtttggaatgttttttgatagaatgatttttatttttttgaagttatttatttggttgtgtttttgtttttggggttatttgggtgaggttgttttggtttttattttgtatataaaaaaagtttaagtttgggtgtttgaggaattgtattattgtttttgtgttgtgggggaggatgttttttgattttttttttgtttttttttgttgtgtgggttgaattttatgaattttttggaattgatagttgagttttaaattttgtgtttaaggtgagaggttagtgttgggaggaaatgattttgttggtgagggaaagggggtgttgatgttttaggaattagatttgggtagagtggggttttttagtgatagtgggggaggggagtgtgtttatttttattgttttttgatttttgaatttttttgttggggttgggggttattttttattttttttttttaattttattttaatatatgtattttgaaaatggttaaagtggttaggttgggattggtatgtttaatagttgtttttttttttattaggagggtggatatagtgtagtggataggggagagttatagagaagtattttaatgggtgtggtgttgtgtttaattaggataggattttgggatgttagttttgaaaatagggtgtttggggttgtgttgggggttttattgttgtagtttttttatgtgatttgtttttgtgtatttttagtttgggtgattgtattgtttgttattatttttatatgtttttttaggaaattattgaaggtaaatatatgaatagttttttgtttggaatgttaataggatattgtaatgtttgtagaaaatgagtgggaataaatgatttttttaaaaattagagtgtggaataaaaggtaaaagtgggtgttgggttatatgttgttaagttgagaattgggtttttaggttagttgttttagagggtaggaggtgagatagatagtttatttagaggggttgttttgttttggtgatattgttagtttggttaagttagggttttttgtttgtagggttttagtgttttttgtttataaatggtaattttatagtttattttagagttgtttaatggggtttgagaagtagtttgggtgggagtgtttttaggtagtgattttttgggagtttaaagtagaaagtaatggatgagtaagtgagtatttagttgtttttttggtagtaattatttgtttaatttgaatgatgtttttgttatgattattaataaatatttgttaaaggtttttatgtgtgatattttggaaggtttaaaggtttgaggagttgattttagggatagtgttttggtggggggtggtgtaagaaagtaaatggttgggggaaaattttgtggagagattgtgtaaagaagagaggttaatatttgttttttttgtaaaagtaaaataaatttagtggttaggagtaatttttggataggaggtttttgaattgaggtggttggttttttaaattgagttttgtttttatagtttttgtttttattattgtttataggtgggtttgaattttgttttttgttttttaaggttggtttgaggttggtttgggagaagttgggtttgtgtttggtagttagtttggggtgttgggggaaggtggggttagtttttgttgtgtttttttagtgttgttttaagattttttgagattggt

SEQ ID NO: 466 - DNA, 5846 bp, homo sapiens
ggagagaaacagaggaggagactgcaagagatcattggaggccgtgggcacgctctttactccatgtgtgggacattcattgcggaataacatcggaggagaaggtaagggaaaagaaaaaatgattttttgtttataagggaagtccctgatcagactctgggactggagaaagcgaagtaacttcaaactttgggcgacaagaaaaaaaaaaaggagctggattccagttgtgtgtccagagagtaatttttttttttcggaataaacttcacttggggacgggtgggagataaccatagagttagaaagtctaggtattttttttaaacacacattttccagacctatttttaaaaacaatgtttttctaacaaccctatggcctcccaaagaaattgtttaggcttacatttttgaggtttcttttgggagtgggggtggtgttcgtgaatactgggccgaacaccaaggaactgggggtggaggcagaggtgtttgccctcttcttggcagtgggtcctggaaggcgacaggttttaaatgagtgttttcattcctcgcctgcggtttggcgggacagcgctgcagcccatggtgtggagcgcggctgggggaccagggggaggtggggagaggggagcgtggaggggagcgtggaggggggcgcgcgaaggggttgcggggcgcaggaggcgggctgggctcggctggagaccggacctcggtgttggcctacagcacagggagccggccgaatgcgcgtgattactggacggcgctgctctgggagagagtcggggccagatttggcgcggcggtgaggcggctgcgggacaagcagaggcgcgcgggcgtgggcaagggtttggggcgctctggagcggtttgttgggtcagtgaggtgccagggagagcgggtgcctgccgggcagtgtgctcgggttgcacgccctagcgcgggggcgacagcggcggcgcgggcgggcggtctggaataatgacaaacacatttggccctgagtgaagaagtcgtcgtcgcctcgcattccagcaactgggatttgaggaatttcgaaccgcacaccaaggggccctcattgtgctccgtggcccccgcccccgcctgtcttcccgcgccccctcctcggtggaatcatttctgcattgcccgggggctctgctttcgctcagttctggccgcaggcaggaagagaggaaaggtctccaggaaggtgccgaacttcttgtgaggaagttagggacgacttggaactggggaaacttgtttgcaggtaagacagaaaggtgggaggtaaaccatattctccctccgggcacccgagccctggacaccccctacccggcacccttctccgcgcgggggtgcgtggcacttgccgtctgagctcgcccagcgctgctcggtcctctctagttggccttttttccattcctctccctgccggcttcagagccgtctgtgcgtacttctccttcctctgctgtctacccccatggaaaccagatttacacacgaaattaactccgcccggctgcgcccagggagcgggcggcgtccatttggcattgaatatgtgggatcagctgttctattccgggagggtgtcggccaggtcggagcgacgagtgtggcccaacccgagtacgttgccagagggagccaggagcctgggccgggccaggtgtgcgagagctgccgatggcctggcctcgcgtcttggtcgggaaggacttgctggcctggcaggctgtgcgttgtgcatccctcccgcagccagagcgccggtcccgcacttcgctccccgaattgtgctaagacctcaggatgtgcgcaaggagtgcctggaagaacttgccactcactccatcttcctgggtgggaggcaagcatggatggggcccatatcaggtccctaccgccccgcgtccgaaaagccgcgggctgggcggtgtgggaaatggctttttggctccgaggccaaattgctcaatgttttggaccgactcgcctcgccgcggtcgctcctgacaagaactagacagatttttggagcagggagcatccagggcaaacgcacgacagtcctccgcagtgcatctcaccggacaaacatccccggagccacaggaggggaggaaggggctctccgggcgtgcgcacctccccagccgccgcgctgtcccatccccgacccctaatctggtcaacctggaccccggcactgctgaattgcatcccctcttctccctttctcctcggcctcctcctttccacaaccctcaagatgaggaggccctgcctcgactccccgacaggcgcaaggccgaccaggctcgctttgacgccctggtcaggccctgcttcggagcttgcagttttgggttgacccaagtgcagctggacctcgttcacaagagtgaggggaagccaagaatgaacccgtcgttagcccccggtgccctggctcttgtttaaatccttagatcgagaaggacttgaaggagatcccaggctcccagctctgcgcccctgggccagtttcctctcgggacgcggactgaggagggatgcagggggaggggcattgggccgggctttccagctgcaaacacgtctggcgccgaggcgggcccattttgtgcctcctggggacggaccgtgggcggcgcgcagcggcgggacgcgttttggggacgtggtggccagcgccttcctgcagaccccacagggaagtactccctttgacctccggggagctgcgaccaggttatacgttgctggtggaaaagtgacaattctaggaaaagagctaaaagccggatcggtgaccgaaaggtgtgggtctcagggttccccgggtctaactcgccgggtccaaccgcagcatcagccttggggcggcagataatctttcggtctcgcctggggcgcaagatgcaggatcgggggcaaatggcttctcccaacttccccctaattcgggttctgccagatggttgtcgtttgctgaagtggctcggcggcatttccttttgttttaaactgatcaatgagcgaacctgggatgggctgaaaaagtagattgtaggagggaataatgggaaacccgacttggggcgcctccttccctgcctcctactgcagtttctcggcccccgcgaaaggggagcgacaagcgcgggtgggcgcggactcttgagggggcagaggcggctatggcgcgtgtcgggcaaggtggcaccagaaggcacttttgtgtgtgtgtgtgacaagagtctcgctctgtcgcccaggctgaagtgcagtggtgcgatctcggctcactgcaacctctgcctcccaggttcaagcgattctcctgcctcagcctcccgagtaactgggattacaggtgcccgccaccacgccaggctaatttttgtatttttagtagagacggggtttcaccatattggccatgctggtctcgaactcctgacctcaggtgatccgcccacctcggcctcccaaagtgctgggatttacaggcgtaagccaccgcgcccggccaggaacggttcttaaatgccgagagggcgcatgctagctctcctcagcattcccggtgagccgctacccacggccgtgcggctctcgtgcccataggaggcgctggcgagctcctgtaaccctaaacccctcggcccctttccccccacccgcccggattctcttcccgctctcccccctctctccacacccgcccggccccctctcgggtctcagttgaaaacaatgcaaacgcagagcgtcgtgcctggggcgcagcggcctctgcagctctgaggttcagagcgcggcgcgcaggggcgcaggggcgcaggtccccggagcggctgggcatcgccgccaaccccgggacaaccaagccgccgaggacttggtggaggtgggagggagagcggaccgcgcagtgttcctctgggtcccggggtcagaagccggacagtggcgggggctggacagtccgagcgcagagcctcccgggcgaagtctgcgcgcagcactcccggctgcgctgtcggggaccaggagcctgggctgcgggcgagctagctggcgagccgggtaagattcgcggggctgtcgcgccctctagtgggctccggggacgcatcccgctttccccagccccgggcggtcggcgccgctatctcagtggagcgcagcgctggaaccccgggggcccggagcggaggctaatctgggtcacctttcccctcctccgggcagccagtggactcctcgcaggctctgtgtgggcccgggaggcgccgggtggacgagagggggccgaggtctctgggtttggattgagaatgggacgtccttgtaattcaatgtgggagaagcaggggagtgtggaggaggacgggtcccgtgcgttcttggggggcaggcgccgtcttctgcgttccagcccctcgccagctcccttgccccgcgggcggcctgttgctgtttgtttgttttacgaccctgcgttattgtgcaacggtaacagtcgtttccaatcagctgcgcggccgtcgcggccctcgccaggctggtttatgggggcggcggtggcgcgcggacagataggacagcgcggcccgggaacggcgtcgaggtccaggcggtccccctgccccgagggggcggaaatgctgaggtggcgagagcgtgggttgcacagaaccctagtagcgagtccggctgagcctctgcggcctagcccagcagcgtcgtcttcccggctccgaagacgtcttcccgaagccccgctgccccggcgcaccagctcccggtgatggggatgatgatggggatgatggggagatgtccccgaattctcctggggtcccgaggagatttagccattttcaacagcagttttcctatttctgcttaaaccccgcgggctttcaactgaggtcaccacgaaagctaaaagtacaacctaaggaaggaagagactggaaattaacatttggggtagtggagctcagaattcctcgcagcggcgtctgtgtcgcaacccgtggacgcacgtccttggaccaacactgccatctgctggccactcgtaagaactactgcgacccgctgtgagaatgggcttcgcggagaccattaggaaggtgctttattttttattttttatttattttttgctcagtaggaccgtaataggtgactgattttcttttgctgtgaggctacaagaattgctggaagacaacatttttatttcgtggaaatttgtgttgtgtttctccttggttgttaatgctttgcatttacatagtgaacatcttattatcagagctggcctgtgaggagggtagtgggggggcattgatgttcccgtttctgagtgaggagacctatgtcggggccttggtgacctcaagccgaatgctcaaactgctactgctactcctaaggttgtgccattaggagtcacacccgtttggtgatattcaaaaggatatgtcattttattctcccgtggttaaatatatggtgagaggagagcaggcatgtttatgagcccagattgtcccataaaaggctcctgtttaaaaacactccagccccctcccattactggaatgtctgatggagctccgggagatcaaaacaacaaaacaggctctggtagggtgcagaggtcctggtaaacacaccctctgctggaaaacagggagaagtttccaccagtgtagacctgcacttggtttgcctgggctgaagttaggagactgcgtagaaaaaggaaaatgtgtaattttcacag

SEQ ID NO: 467 - DNA, 5846 bp, homo sapiens
ggagagaaatagaggaggagattgtaagagattattggaggtcgtgggtacgttttttattttatgtgtgggatatttattgcggaataatatcggaggagaaggtaagggaaaagaaaaaatgattttttgtttataagggaagtttttgattagattttgggattggagaaagcgaagtaattttaaattttgggcgataagaaaaaaaaaaaggagttggattttagttgtgtgtttagagagtaatttttttttttcggaataaattttatttggggacgggtgggagataattatagagttagaaagtttaggtattttttttaaatatatattttttagatttatttttaaaaataatgtttttttaataattttatggttttttaaagaaattgtttaggtttatatttttgaggttttttttgggagtgggggtggtgttcgtgaatattgggtcgaatattaaggaattgggggtggaggtagaggtgtttgttttttttttggtagtgggttttggaaggcgataggttttaaatgagtgtttttatttttcgtttgcggtttggcgggatagcgttgtagtttatggtgtggagcgcggttgggggattagggggaggtggggagaggggagcgtggaggggagcgtggaggggggcgcgcgaaggggttgcggggcgtaggaggcgggttgggttcggttggagatcggatttcggtgttggtttatagtatagggagtcggtcgaatgcgcgtgattattggacggcgttgttttgggagagagtcggggttagatttggcgcggcggtgaggcggttgcgggataagtagaggcgcgcgggcgtgggtaagggtttggggcgttttggagcggtttgttgggttagtgaggtgttagggagagcgggtgtttgtcgggtagtgtgttcgggttgtacgttttagcgcgggggcgatagcggcggcgcgggcgggcggtttggaataatgataaatatatttggttttgagtgaagaagtcgtcgtcgtttcgtattttagtaattgggatttgaggaatttcgaatcgtatattaaggggtttttattgtgtttcgtggttttcgttttcgtttgttttttcgcgtttttttttcggtggaattatttttgtattgttcgggggttttgttttcgtttagttttggtcgtaggtaggaagagaggaaaggtttttaggaaggtgtcgaattttttgtgaggaagttagggacgatttggaattggggaaatttgtttgtaggtaagatagaaaggtgggaggtaaattatatttttttttcgggtattcgagttttggatattttttattcggtattttttttcgcgcgggggtgcgtggtatttgtcgtttgagttcgtttagcgttgttcggttttttttagttggttttttttttatttttttttttgtcggttttagagtcgtttgtgcgtattttttttttttttgttgtttatttttatggaaattagatttatatacgaaattaatttcgttcggttgcgtttagggagcgggcggcgtttatttggtattgaatatgtgggattagttgttttatttcgggagggtgtcggttaggtcggagcgacgagtgtggtttaattcgagtacgttgttagagggagttaggagtttgggtcgggttaggtgtgcgagagttgtcgatggtttggtttcgcgttttggtcgggaaggatttgttggtttggtaggttgtgcgttgtgtatttttttcgtagttagagcgtcggtttcgtatttcgtttttcgaattgtgttaagattttaggatgtgcgtaaggagtgtttggaagaatttgttatttattttatttttttgggtgggaggtaagtatggatggggtttatattaggtttttatcgtttcgcgttcgaaaagtcgcgggttgggcggtgtgggaaatggttttttggtttcgaggttaaattgtttaatgttttggatcgattcgtttcgtcgcggtcgtttttgataagaattagatagatttttggagtagggagtatttagggtaaacgtacgatagtttttcgtagtgtattttatcggataaatattttcggagttataggaggggaggaaggggtttttcgggcgtgcgtatttttttagtcgtcgcgttgttttattttcgatttttaatttggttaatttggatttcggtattgttgaattgtattttttttttttttttttttttcggtttttttttttttataatttttaagatgaggaggttttgtttcgatttttcgataggcgtaaggtcgattaggttcgttttgacgttttggttaggttttgtttcggagtttgtagttttgggttgatttaagtgtagttggatttcgtttataagagtgaggggaagttaagaatgaattcgtcgttagttttcggtgttttggtttttgtttaaatttttagatcgagaaggatttgaaggagattttaggtttttagttttgcgtttttgggttagttttttttcgggacgcggattgaggagggatgtagggggaggggtattgggtcgggttttttagttgtaaatacgtttggcgtcgaggcgggtttattttgtgttttttggggacggatcgtgggcggcgcgtagcggcgggacgcgttttggggacgtggtggttagcgtttttttgtagattttatagggaagtattttttttgattttcggggagttgcgattaggttatacgttgttggtggaaaagtgataattttaggaaaagagttaaaagtcggatcggtgatcgaaaggtgtgggttttagggtttttcgggtttaattcgtcgggtttaatcgtagtattagttttggggcggtagataatttttcggtttcgtttggggcgtaagatgtaggatcgggggtaaatggttttttttaatttttttttaattcgggttttgttagatggttgtcgtttgttgaagtggttcggcggtatttttttttgttttaaattgattaatgagcgaatttgggatgggttgaaaaagtagattgtaggagggaataatgggaaattcgatttggggcgtttttttttttgttttttattgtagtttttcggttttcgcgaaaggggagcgataagcgcgggtgggcgcggatttttgagggggtagaggcggttatggcgcgtgtcgggtaaggtggtattagaaggtatttttgtgtgtgtgtgtgataagagtttcgttttgtcgtttaggttgaagtgtagtggtgcgatttcggtttattgtaatttttgttttttaggtttaagcgatttttttgttttagtttttcgagtaattgggattataggtgttcgttattacgttaggttaatttttgtatttttagtagagacggggttttattatattggttatgttggtttcgaatttttgattttaggtgattcgtttatttcggttttttaaagtgttgggatttataggcgtaagttatcgcgttcggttaggaacggtttttaaatgtcgagagggcgtatgttagttttttttagtattttcggtgagtcgttatttacggtcgtgcggttttcgtgtttataggaggcgttggcgagtttttgtaattttaaatttttcggtttttttttttttattcgttcggatttttttttcgtttttttttttttttttatattcgttcggttttttttcgggttttagttgaaaataatgtaaacgtagagcgtcgtgtttggggcgtagcggtttttgtagttttgaggtttagagcgcggcgcgtaggggcgtaggggcgtaggttttcggagcggttgggtatcgtcgttaatttcgggataattaagtcgtcgaggatttggtggaggtgggagggagagcggatcgcgtagtgtttttttgggtttcggggttagaagtcggatagtggcgggggttggatagttcgagcgtagagtttttcgggcgaagtttgcgcgtagtattttcggttgcgttgtcggggattaggagtttgggttgcgggcgagttagttggcgagtcgggtaagattcgcggggttgtcgcgttttttagtgggtttcggggacgtatttcgttttttttagtttcgggcggtcggcgtcgttattttagtggagcgtagcgttggaatttcgggggttcggagcggaggttaatttgggttattttttttttttttcgggtagttagtggatttttcgtaggttttgtgtgggttcgggaggcgtcgggtggacgagagggggtcgaggtttttgggtttggattgagaatgggacgtttttgtaatttaatgtgggagaagtaggggagtgtggaggaggacgggtttcgtgcgtttttggggggtaggcgtcgttttttgcgttttagtttttcgttagtttttttgtttcgcgggcggtttgttgttgtttgtttgttttacgattttgcgttattgtgtaacggtaatagtcgtttttaattagttgcgcggtcgtcgcggttttcgttaggttggtttatgggggcggcggtggcgcgcggatagataggatagcgcggttcgggaacggcgtcgaggtttaggcggtttttttgtttcgagggggcggaaatgttgaggtggcgagagcgtgggttgtatagaattttagtagcgagttcggttgagtttttgcggtttagtttagtagcgtcgttttttcggtttcgaagacgttttttcgaagtttcgttgtttcggcgtattagttttcggtgatggggatgatgatggggatgatggggagatgttttcgaatttttttggggtttcgaggagatttagttatttttaatagtagtttttttatttttgtttaaatttcgcgggtttttaattgaggttattacgaaagttaaaagtataatttaaggaaggaagagattggaaattaatatttggggtagtggagtttagaatttttcgtagcggcgtttgtgtcgtaattcgtggacgtacgtttttggattaatattgttatttgttggttattcgtaagaattattgcgattcgttgtgagaatgggtttcgcggagattattaggaaggtgttttattttttattttttatttattttttgtttagtaggatcgtaataggtgattgatttttttttgttgtgaggttataagaattgttggaagataatatttttatttcgtggaaatttgtgttgtgtttttttttggttgttaatgttttgtatttatatagtgaatattttattattagagttggtttgtgaggagggtagtgggggggtattgatgttttcgtttttgagtgaggagatttatgtcggggttttggtgattttaagtcgaatgtttaaattgttattgttatttttaaggttgtgttattaggagttatattcgtttggtgatatttaaaaggatatgttattttattttttcgtggttaaatatatggtgagaggagagtaggtatgtttatgagtttagattgttttataaaaggtttttgtttaaaaatattttagtttttttttattattggaatgtttgatggagtttcgggagattaaaataataaaataggttttggtagggtgtagaggttttggtaaatatattttttgttggaaaatagggagaagtttttattagtgtagatttgtatttggtttgtttgggttgaagttaggagattgcgtagaaaaaggaaaatgtgtaatttttatag

SEQ ID NO: 468 - DNA, 5846 bp, homo sapiens
ggagagaaatagaggaggagattgtaagagattattggaggttgtgggtatgttttttattttatgtgtgggatatttattgtggaataatattggaggagaaggtaagggaaaagaaaaaatgattttttgtttataagggaagtttttgattagattttgggattggagaaagtgaagtaattttaaattttgggtgataagaaaaaaaaaaaggagttggattttagttgtgtgtttagagagtaattttttttttttggaataaattttatttggggatgggtgggagataattatagagttagaaagtttaggtattttttttaaatatatattttttagatttatttttaaaaataatgtttttttaataattttatggttttttaaagaaattgtttaggtttatatttttgaggttttttttgggagtgggggtggtgtttgtgaatattgggttgaatattaaggaattgggggtggaggtagaggtgtttgttttttttttggtagtgggttttggaaggtgataggttttaaatgagtgtttttattttttgtttgtggtttggtgggatagtgttgtagtttatggtgtggagtgtggttgggggattagggggaggtggggagaggggagtgtggaggggagtgtggaggggggtgtgtgaaggggttgtggggtgtaggaggtgggttgggtttggttggagattggattttggtgttggtttatagtatagggagttggttgaatgtgtgtgattattggatggtgttgttttgggagagagttggggttagatttggtgtggtggtgaggtggttgtgggataagtagaggtgtgtgggtgtgggtaagggtttggggtgttttggagtggtttgttgggttagtgaggtgttagggagagtgggtgtttgttgggtagtgtgtttgggttgtatgttttagtgtgggggtgatagtggtggtgtgggtgggtggtttggaataatgataaatatatttggttttgagtgaagaagttgttgttgttttgtattttagtaattgggatttgaggaattttgaattgtatattaaggggtttttattgtgttttgtggtttttgtttttgtttgtttttttgtgttttttttttggtggaattatttttgtattgtttgggggttttgtttttgtttagttttggttgtaggtaggaagagaggaaaggtttttaggaaggtgttgaattttttgtgaggaagttagggatgatttggaattggggaaatttgtttgtaggtaagatagaaaggtgggaggtaaattatattttttttttgggtatttgagttttggatattttttatttggtatttttttttgtgtgggggtgtgtggtatttgttgtttgagtttgtttagtgttgtttggttttttttagttggttttttttttatttttttttttgttggttttagagttgtttgtgtgtattttttttttttttgttgtttatttttatggaaattagatttatatatgaaattaattttgtttggttgtgtttagggagtgggtggtgtttatttggtattgaatatgtgggattagttgttttattttgggagggtgttggttaggttggagtgatgagtgtggtttaatttgagtatgttgttagagggagttaggagtttgggttgggttaggtgtgtgagagttgttgatggtttggttttgtgttttggttgggaaggatttgttggtttggtaggttgtgtgttgtgtattttttttgtagttagagtgttggttttgtattttgttttttgaattgtgttaagattttaggatgtgtgtaaggagtgtttggaagaatttgttatttattttatttttttgggtgggaggtaagtatggatggggtttatattaggtttttattgttttgtgtttgaaaagttgtgggttgggtggtgtgggaaatggttttttggttttgaggttaaattgtttaatgttttggattgatttgttttgttgtggttgtttttgataagaattagatagatttttggagtagggagtatttagggtaaatgtatgatagttttttgtagtgtattttattggataaatatttttggagttataggaggggaggaaggggttttttgggtgtgtgtatttttttagttgttgtgttgttttatttttgatttttaatttggttaatttggattttggtattgttgaattgtatttttttttttttttttttttttggtttttttttttttataatttttaagatgaggaggttttgttttgattttttgataggtgtaaggttgattaggtttgttttgatgttttggttaggttttgttttggagtttgtagttttgggttgatttaagtgtagttggattttgtttataagagtgaggggaagttaagaatgaatttgttgttagtttttggtgttttggtttttgtttaaatttttagattgagaaggatttgaaggagattttaggtttttagttttgtgtttttgggttagtttttttttgggatgtggattgaggagggatgtagggggaggggtattgggttgggttttttagttgtaaatatgtttggtgttgaggtgggtttattttgtgttttttggggatggattgtgggtggtgtgtagtggtgggatgtgttttggggatgtggtggttagtgtttttttgtagattttatagggaagtattttttttgatttttggggagttgtgattaggttatatgttgttggtggaaaagtgataattttaggaaaagagttaaaagttggattggtgattgaaaggtgtgggttttagggttttttgggtttaatttgttgggtttaattgtagtattagttttggggtggtagataattttttggttttgtttggggtgtaagatgtaggattgggggtaaatggttttttttaatttttttttaatttgggttttgttagatggttgttgtttgttgaagtggtttggtggtatttttttttgttttaaattgattaatgagtgaatttgggatgggttgaaaaagtagattgtaggagggaataatgggaaatttgatttggggtgtttttttttttgttttttattgtagttttttggtttttgtgaaaggggagtgataagtgtgggtgggtgtggatttttgagggggtagaggtggttatggtgtgtgttgggtaaggtggtattagaaggtatttttgtgtgtgtgtgtgataagagttttgttttgttgtttaggttgaagtgtagtggtgtgattttggtttattgtaatttttgttttttaggtttaagtgatttttttgttttagttttttgagtaattgggattataggtgtttgttattatgttaggttaatttttgtatttttagtagagatggggttttattatattggttatgttggttttgaatttttgattttaggtgatttgtttattttggttttttaaagtgttgggatttataggtgtaagttattgtgtttggttaggaatggtttttaaatgttgagagggtgtatgttagttttttttagtatttttggtgagttgttatttatggttgtgtggtttttgtgtttataggaggtgttggtgagtttttgtaattttaaattttttggtttttttttttttatttgtttggattttttttttgtttttttttttttttttatatttgtttggtttttttttgggttttagttgaaaataatgtaaatgtagagtgttgtgtttggggtgtagtggtttttgtagttttgaggtttagagtgtggtgtgtaggggtgtaggggtgtaggtttttggagtggttgggtattgttgttaattttgggataattaagttgttgaggatttggtggaggtgggagggagagtggattgtgtagtgtttttttgggttttggggttagaagttggatagtggtgggggttggatagtttgagtgtagagttttttgggtgaagtttgtgtgtagtatttttggttgtgttgttggggattaggagtttgggttgtgggtgagttagttggtgagttgggtaagatttgtggggttgttgtgttttttagtgggttttggggatgtattttgttttttttagttttgggtggttggtgttgttattttagtggagtgtagtgttggaattttgggggtttggagtggaggttaatttgggttatttttttttttttttgggtagttagtggattttttgtaggttttgtgtgggtttgggaggtgttgggtggatgagagggggttgaggtttttgggtttggattgagaatgggatgtttttgtaatttaatgtgggagaagtaggggagtgtggaggaggatgggttttgtgtgtttttggggggtaggtgttgttttttgtgttttagttttttgttagtttttttgttttgtgggtggtttgttgttgtttgtttgttttatgattttgtgttattgtgtaatggtaatagttgtttttaattagttgtgtggttgttgtggtttttgttaggttggtttatgggggtggtggtggtgtgtggatagataggatagtgtggtttgggaatggtgttgaggtttaggtggtttttttgttttgagggggtggaaatgttgaggtggtgagagtgtgggttgtatagaattttagtagtgagtttggttgagtttttgtggtttagtttagtagtgttgtttttttggttttgaagatgtttttttgaagttttgttgttttggtgtattagtttttggtgatggggatgatgatggggatgatggggagatgtttttgaatttttttggggttttgaggagatttagttatttttaatagtagtttttttatttttgtttaaattttgtgggtttttaattgaggttattatgaaagttaaaagtataatttaaggaaggaagagattggaaattaatatttggggtagtggagtttagaattttttgtagtggtgtttgtgttgtaatttgtggatgtatgtttttggattaatattgttatttgttggttatttgtaagaattattgtgatttgttgtgagaatgggttttgtggagattattaggaaggtgttttattttttattttttatttattttttgtttagtaggattgtaataggtgattgatttttttttgttgtgaggttataagaattgttggaagataatatttttattttgtggaaatttgtgttgtgtttttttttggttgttaatgttttgtatttatatagtgaatattttattattagagttggtttgtgaggagggtagtgggggggtattgatgtttttgtttttgagtgaggagatttatgttggggttttggtgattttaagttgaatgtttaaattgttattgttatttttaaggttgtgttattaggagttatatttgtttggtgatatttaaaaggatatgttattttatttttttgtggttaaatatatggtgagaggagagtaggtatgtttatgagtttagattgttttataaaaggtttttgtttaaaaatattttagtttttttttattattggaatgtttgatggagttttgggagattaaaataataaaataggttttggtagggtgtagaggttttggtaaatatattttttgttggaaaatagggagaagtttttattagtgtagatttgtatttggtttgtttgggttgaagttaggagattgtgtagaaaaaggaaaatgtgtaatttttatag

SEQ ID NO: 469 - DNA, 5846 bp, homo sapiens
ttgtgaaaattatatatttttttttttttacgtagttttttaattttagtttaggtaaattaagtgtaggtttatattggtggaaatttttttttgttttttagtagagggtgtgtttattaggatttttgtattttattagagtttgttttgttgttttgatttttcggagttttattagatattttagtaatgggagggggttggagtgtttttaaataggagttttttatgggataatttgggtttataaatatgtttgttttttttttattatatatttaattacgggagaataaaatgatatatttttttgaatattattaaacgggtgtgatttttaatggtataattttaggagtagtagtagtagtttgagtattcggtttgaggttattaaggtttcgatataggtttttttatttagaaacgggaatattaatgtttttttattattttttttataggttagttttgataataagatgtttattatgtaaatgtaaagtattaataattaaggagaaatataatataaatttttacgaaataaaaatgttgttttttagtaatttttgtagttttatagtaaaagaaaattagttatttattacggttttattgagtaaaaaataaataaaaaataaaaaataaagtatttttttaatggttttcgcgaagtttatttttatagcgggtcgtagtagtttttacgagtggttagtagatggtagtgttggtttaaggacgtgcgtttacgggttgcgatatagacgtcgttgcgaggaattttgagttttattattttaaatgttaatttttagttttttttttttttaggttgtatttttagttttcgtggtgattttagttgaaagttcgcggggtttaagtagaaataggaaaattgttgttgaaaatggttaaattttttcgggattttaggagaattcggggatatttttttattatttttattattatttttattatcgggagttggtgcgtcggggtagcggggtttcgggaagacgttttcggagtcgggaagacgacgttgttgggttaggtcgtagaggtttagtcggattcgttattagggttttgtgtaatttacgttttcgttattttagtattttcgttttttcggggtagggggatcgtttggatttcgacgtcgttttcgggtcgcgttgttttatttgttcgcgcgttatcgtcgtttttataaattagtttggcgagggtcgcgacggtcgcgtagttgattggaaacgattgttatcgttgtataataacgtagggtcgtaaaataaataaatagtaataggtcgttcgcggggtaagggagttggcgaggggttggaacgtagaagacggcgtttgttttttaagaacgtacgggattcgtttttttttatatttttttgttttttttatattgaattataaggacgttttatttttaatttaaatttagagatttcggttttttttcgtttattcggcgtttttcgggtttatatagagtttgcgaggagtttattggttgttcggaggaggggaaaggtgatttagattagttttcgtttcgggttttcggggttttagcgttgcgttttattgagatagcggcgtcgatcgttcggggttggggaaagcgggatgcgttttcggagtttattagagggcgcgatagtttcgcgaattttattcggttcgttagttagttcgttcgtagtttaggtttttggttttcgatagcgtagtcgggagtgttgcgcgtagatttcgttcgggaggttttgcgttcggattgtttagttttcgttattgttcggtttttgatttcgggatttagaggaatattgcgcggttcgtttttttttttatttttattaagttttcggcggtttggttgtttcggggttggcggcgatgtttagtcgtttcggggatttgcgtttttgcgtttttgcgcgtcgcgttttgaattttagagttgtagaggtcgttgcgttttaggtacgacgttttgcgtttgtattgtttttaattgagattcgagagggggtcgggcgggtgtggagagaggggggagagcgggaagagaattcgggcgggtggggggaaaggggtcgaggggtttagggttataggagttcgttagcgttttttatgggtacgagagtcgtacggtcgtgggtagcggtttatcgggaatgttgaggagagttagtatgcgttttttcggtatttaagaatcgtttttggtcgggcgcggtggtttacgtttgtaaattttagtattttgggaggtcgaggtgggcggattatttgaggttaggagttcgagattagtatggttaatatggtgaaatttcgtttttattaaaaatataaaaattagtttggcgtggtggcgggtatttgtaattttagttattcgggaggttgaggtaggagaatcgtttgaatttgggaggtagaggttgtagtgagtcgagatcgtattattgtattttagtttgggcgatagagcgagatttttgttatatatatatataaaagtgttttttggtgttattttgttcgatacgcgttatagtcgtttttgtttttttaagagttcgcgtttattcgcgtttgtcgtttttttttcgcgggggtcgagaaattgtagtaggaggtagggaaggaggcgttttaagtcgggttttttattatttttttttataatttatttttttagtttattttaggttcgtttattgattagtttaaaataaaaggaaatgtcgtcgagttattttagtaaacgataattatttggtagaattcgaattagggggaagttgggagaagttatttgttttcgattttgtattttgcgttttaggcgagatcgaaagattatttgtcgttttaaggttgatgttgcggttggattcggcgagttagattcggggaattttgagatttatatttttcggttatcgattcggtttttagttttttttttagaattgttatttttttattagtaacgtataatttggtcgtagtttttcggaggttaaagggagtatttttttgtggggtttgtaggaaggcgttggttattacgtttttaaaacgcgtttcgtcgttgcgcgtcgtttacggttcgtttttaggaggtataaaatgggttcgtttcggcgttagacgtgtttgtagttggaaagttcggtttaatgtttttttttttgtatttttttttagttcgcgtttcgagaggaaattggtttaggggcgtagagttgggagtttgggattttttttaagtttttttcgatttaaggatttaaataagagttagggtatcgggggttaacgacgggtttatttttggtttttttttatttttgtgaacgaggtttagttgtatttgggttaatttaaaattgtaagtttcgaagtagggtttgattagggcgttaaagcgagtttggtcggttttgcgtttgtcggggagtcgaggtagggtttttttattttgagggttgtggaaaggaggaggtcgaggagaaagggagaagaggggatgtaatttagtagtgtcggggtttaggttgattagattaggggtcggggatgggatagcgcggcggttggggaggtgcgtacgttcggagagtttttttttttttttttgtggtttcggggatgtttgttcggtgagatgtattgcggaggattgtcgtgcgtttgttttggatgttttttgttttaaaaatttgtttagtttttgttaggagcgatcgcggcgaggcgagtcggtttaaaatattgagtaatttggtttcggagttaaaaagttattttttatatcgtttagttcgcggtttttcggacgcggggcggtagggatttgatatgggttttatttatgtttgttttttatttaggaagatggagtgagtggtaagtttttttaggtattttttgcgtatattttgaggttttagtataattcggggagcgaagtgcgggatcggcgttttggttgcgggagggatgtataacgtatagtttgttaggttagtaagtttttttcgattaagacgcgaggttaggttatcggtagttttcgtatatttggttcggtttaggtttttggttttttttggtaacgtattcgggttgggttatattcgtcgtttcgatttggtcgatattttttcggaatagaatagttgattttatatatttaatgttaaatggacgtcgttcgttttttgggcgtagtcgggcggagttaatttcgtgtgtaaatttggtttttatgggggtagatagtagaggaaggagaagtacgtatagacggttttgaagtcggtagggagaggaatggaaaaaaggttaattagagaggatcgagtagcgttgggcgagtttagacggtaagtgttacgtattttcgcgcggagaagggtgtcgggtagggggtgtttagggttcgggtgttcggagggagaatatggtttattttttatttttttgttttatttgtaaataagtttttttagttttaagtcgtttttaatttttttataagaagttcggtatttttttggagattttttttttttttttgtttgcggttagaattgagcgaaagtagagttttcgggtaatgtagaaatgattttatcgaggagggggcgcgggaagataggcgggggcgggggttacggagtataatgagggttttttggtgtgcggttcgaaattttttaaattttagttgttggaatgcgaggcgacgacgatttttttatttagggttaaatgtgtttgttattattttagatcgttcgttcgcgtcgtcgttgtcgttttcgcgttagggcgtgtaattcgagtatattgttcggtaggtattcgttttttttggtattttattgatttaataaatcgttttagagcgttttaaatttttgtttacgttcgcgcgtttttgtttgtttcgtagtcgttttatcgtcgcgttaaatttggtttcgatttttttttagagtagcgtcgtttagtaattacgcgtattcggtcggttttttgtgttgtaggttaatatcgaggttcggtttttagtcgagtttagttcgttttttgcgtttcgtaattttttcgcgcgtttttttttacgtttttttttacgtttttttttttttatttttttttggttttttagtcgcgttttatattatgggttgtagcgttgtttcgttaaatcgtaggcgaggaatgaaaatatttatttaaaatttgtcgttttttaggatttattgttaagaagagggtaaatatttttgtttttatttttagttttttggtgttcggtttagtatttacgaatattatttttatttttaaaagaaattttaaaaatgtaagtttaaataatttttttgggaggttatagggttgttagaaaaatattgtttttaaaaataggtttggaaaatgtgtgtttaaaaaaaatatttagattttttaattttatggttattttttattcgtttttaagtgaagtttatttcgaaaaaaaaaaattattttttggatatataattggaatttagttttttttttttttttttgtcgtttaaagtttgaagttatttcgttttttttagttttagagtttgattagggattttttttataaataaaaaattattttttttttttttttattttttttttcgatgttatttcgtaatgaatgttttatatatggagtaaagagcgtgtttacggtttttaatgattttttgtagtttttttttttgttttttttt

SEQ ID NO: 470 - DNA, 5846 bp, homo sapiens
ttgtgaaaattatatatttttttttttttatgtagttttttaattttagtttaggtaaattaagtgtaggtttatattggtggaaatttttttttgttttttagtagagggtgtgtttattaggatttttgtattttattagagtttgttttgttgttttgattttttggagttttattagatattttagtaatgggagggggttggagtgtttttaaataggagttttttatgggataatttgggtttataaatatgtttgttttttttttattatatatttaattatgggagaataaaatgatatatttttttgaatattattaaatgggtgtgatttttaatggtataattttaggagtagtagtagtagtttgagtatttggtttgaggttattaaggttttgatataggtttttttatttagaaatgggaatattaatgtttttttattattttttttataggttagttttgataataagatgtttattatgtaaatgtaaagtattaataattaaggagaaatataatataaatttttatgaaataaaaatgttgttttttagtaatttttgtagttttatagtaaaagaaaattagttatttattatggttttattgagtaaaaaataaataaaaaataaaaaataaagtatttttttaatggtttttgtgaagtttatttttatagtgggttgtagtagtttttatgagtggttagtagatggtagtgttggtttaaggatgtgtgtttatgggttgtgatatagatgttgttgtgaggaattttgagttttattattttaaatgttaatttttagttttttttttttttaggttgtatttttagtttttgtggtgattttagttgaaagtttgtggggtttaagtagaaataggaaaattgttgttgaaaatggttaaatttttttgggattttaggagaatttggggatatttttttattatttttattattatttttattattgggagttggtgtgttggggtagtggggttttgggaagatgtttttggagttgggaagatgatgttgttgggttaggttgtagaggtttagttggatttgttattagggttttgtgtaatttatgtttttgttattttagtatttttgtttttttggggtagggggattgtttggattttgatgttgtttttgggttgtgttgttttatttgtttgtgtgttattgttgtttttataaattagtttggtgagggttgtgatggttgtgtagttgattggaaatgattgttattgttgtataataatgtagggttgtaaaataaataaatagtaataggttgtttgtggggtaagggagttggtgaggggttggaatgtagaagatggtgtttgttttttaagaatgtatgggatttgtttttttttatatttttttgttttttttatattgaattataaggatgttttatttttaatttaaatttagagattttggtttttttttgtttatttggtgttttttgggtttatatagagtttgtgaggagtttattggttgtttggaggaggggaaaggtgatttagattagtttttgttttgggtttttggggttttagtgttgtgttttattgagatagtggtgttgattgtttggggttggggaaagtgggatgtgtttttggagtttattagagggtgtgatagttttgtgaattttatttggtttgttagttagtttgtttgtagtttaggtttttggtttttgatagtgtagttgggagtgttgtgtgtagattttgtttgggaggttttgtgtttggattgtttagtttttgttattgtttggtttttgattttgggatttagaggaatattgtgtggtttgtttttttttttatttttattaagtttttggtggtttggttgttttggggttggtggtgatgtttagttgttttggggatttgtgtttttgtgtttttgtgtgttgtgttttgaattttagagttgtagaggttgttgtgttttaggtatgatgttttgtgtttgtattgtttttaattgagatttgagagggggttgggtgggtgtggagagaggggggagagtgggaagagaatttgggtgggtggggggaaaggggttgaggggtttagggttataggagtttgttagtgttttttatgggtatgagagttgtatggttgtgggtagtggtttattgggaatgttgaggagagttagtatgtgtttttttggtatttaagaattgtttttggttgggtgtggtggtttatgtttgtaaattttagtattttgggaggttgaggtgggtggattatttgaggttaggagtttgagattagtatggttaatatggtgaaattttgtttttattaaaaatataaaaattagtttggtgtggtggtgggtatttgtaattttagttatttgggaggttgaggtaggagaattgtttgaatttgggaggtagaggttgtagtgagttgagattgtattattgtattttagtttgggtgatagagtgagatttttgttatatatatatataaaagtgttttttggtgttattttgtttgatatgtgttatagttgtttttgtttttttaagagtttgtgtttatttgtgtttgttgttttttttttgtgggggttgagaaattgtagtaggaggtagggaaggaggtgttttaagttgggttttttattatttttttttataatttatttttttagtttattttaggtttgtttattgattagtttaaaataaaaggaaatgttgttgagttattttagtaaatgataattatttggtagaatttgaattagggggaagttgggagaagttatttgtttttgattttgtattttgtgttttaggtgagattgaaagattatttgttgttttaaggttgatgttgtggttggatttggtgagttagatttggggaattttgagatttatattttttggttattgatttggtttttagttttttttttagaattgttatttttttattagtaatgtataatttggttgtagttttttggaggttaaagggagtatttttttgtggggtttgtaggaaggtgttggttattatgtttttaaaatgtgttttgttgttgtgtgttgtttatggtttgtttttaggaggtataaaatgggtttgttttggtgttagatgtgtttgtagttggaaagtttggtttaatgtttttttttttgtatttttttttagtttgtgttttgagaggaaattggtttaggggtgtagagttgggagtttgggattttttttaagttttttttgatttaaggatttaaataagagttagggtattgggggttaatgatgggtttatttttggtttttttttatttttgtgaatgaggtttagttgtatttgggttaatttaaaattgtaagttttgaagtagggtttgattagggtgttaaagtgagtttggttggttttgtgtttgttggggagttgaggtagggtttttttattttgagggttgtggaaaggaggaggttgaggagaaagggagaagaggggatgtaatttagtagtgttggggtttaggttgattagattaggggttggggatgggatagtgtggtggttggggaggtgtgtatgtttggagagtttttttttttttttttgtggttttggggatgtttgtttggtgagatgtattgtggaggattgttgtgtgtttgttttggatgttttttgttttaaaaatttgtttagtttttgttaggagtgattgtggtgaggtgagttggtttaaaatattgagtaatttggttttggagttaaaaagttattttttatattgtttagtttgtggttttttggatgtggggtggtagggatttgatatgggttttatttatgtttgttttttatttaggaagatggagtgagtggtaagtttttttaggtattttttgtgtatattttgaggttttagtataatttggggagtgaagtgtgggattggtgttttggttgtgggagggatgtataatgtatagtttgttaggttagtaagttttttttgattaagatgtgaggttaggttattggtagtttttgtatatttggtttggtttaggtttttggttttttttggtaatgtatttgggttgggttatatttgttgttttgatttggttgatatttttttggaatagaatagttgattttatatatttaatgttaaatggatgttgtttgttttttgggtgtagttgggtggagttaattttgtgtgtaaatttggtttttatgggggtagatagtagaggaaggagaagtatgtatagatggttttgaagttggtagggagaggaatggaaaaaaggttaattagagaggattgagtagtgttgggtgagtttagatggtaagtgttatgtatttttgtgtggagaagggtgttgggtagggggtgtttagggtttgggtgtttggagggagaatatggtttattttttatttttttgttttatttgtaaataagtttttttagttttaagttgtttttaatttttttataagaagtttggtatttttttggagattttttttttttttttgtttgtggttagaattgagtgaaagtagagtttttgggtaatgtagaaatgattttattgaggagggggtgtgggaagataggtgggggtgggggttatggagtataatgagggttttttggtgtgtggtttgaaattttttaaattttagttgttggaatgtgaggtgatgatgatttttttatttagggttaaatgtgtttgttattattttagattgtttgtttgtgttgttgttgttgtttttgtgttagggtgtgtaatttgagtatattgtttggtaggtatttgttttttttggtattttattgatttaataaattgttttagagtgttttaaatttttgtttatgtttgtgtgtttttgtttgttttgtagttgttttattgttgtgttaaatttggttttgatttttttttagagtagtgttgtttagtaattatgtgtatttggttggttttttgtgttgtaggttaatattgaggtttggtttttagttgagtttagtttgttttttgtgttttgtaatttttttgtgtgtttttttttatgtttttttttatgtttttttttttttatttttttttggttttttagttgtgttttatattatgggttgtagtgttgttttgttaaattgtaggtgaggaatgaaaatatttatttaaaatttgttgttttttaggatttattgttaagaagagggtaaatatttttgtttttatttttagttttttggtgtttggtttagtatttatgaatattatttttatttttaaaagaaattttaaaaatgtaagtttaaataatttttttgggaggttatagggttgttagaaaaatattgtttttaaaaataggtttggaaaatgtgtgtttaaaaaaaatatttagattttttaattttatggttattttttatttgtttttaagtgaagtttattttgaaaaaaaaaaattattttttggatatataattggaatttagttttttttttttttttttgttgtttaaagtttgaagttattttgttttttttagttttagagtttgattagggattttttttataaataaaaaattattttttttttttttttatttttttttttgatgttattttgtaatgaatgttttatatatggagtaaagagtgtgtttatggtttttaatgattttttgtagtttttttttttgttttttttt

SEQ ID NO: 471 - DNA, 50 bp, homo sapiens
cgggcttatagcgccaaagagcactaaagactcgcgatgctttgtactta

SEQ ID NO: 472 - DNA, 50 bp, homo sapiens
cgggtttatagcgttaaagagtattaaagattcgcgatgttttgtattta

SEQ ID NO: 473 - DNA, 50 bp, homo sapiens
tgggtttatagtgttaaagagtattaaagatttgtgatgttttgtattta

SEQ ID NO: 474 - DNA, 50 bp, homo sapiens
taagtataaagtatcgcgagtttttagtgttttttggcgttataagttcg

SEQ ID NO: 475 - DNA, 50 bp, homo sapiens
taagtataaagtattgtgagtttttagtgttttttggtgttataagtttg

SEQ ID NO: 476 - DNA, 3001 bp, homo sapiens
caaggaatctctgtattctactttatactccccccaaaataagttttcaaaccgtgaccacatgtgaagcaataattaacctaacaaattttgagagactcagggtttttttttttttgagacagagtttcactcttattgcccaggctggaatgcaatggtacgatctccgctcaccgcaacctccacctcccgggttcaagcgattctcctgcctcagcctcccgcgagtagctgggattacagacatgcgccaccatgcccggcgaattttctatttttaatagacgcggggtttctccatgtcactcaggctggtctcgaacccctgacctcaagtgatccgccccccctcggcctcccaaagtgctgggattacagacgtgagccaccgcgcccggcctctgggctgatcctgccagttttgtaaatgcagcagaaacaatctcctcatacttccaattagagaagcacactggacacaatttgcgtttgagaaaccatcacgcagagtgagtgaatttccaaattaccaatggagaatacccaaatcttttcatgggtacagggggcagtactgacttgtttctcctgggagcgctcttccgaggatatttgggctgtctccggagtcgcagtgtcttcggccgccggaaggtgggtgacgtgcggatcttcttctttttgtggctgtggacacctttcaacactgccttcttggcctttaaagccttcgctttggcttcagctttaggaggggcaggagctgggagaaaaggaaagaaaacgtgggtgcgggatttagaaatcggtcacttccggccccaagaactgcagtgggccaccctggccacaggtgcatcagtggttcctttgaagacatcacaagtgtcaggagattaaaacttttccatcatatgcacgataccagaggcgaaagcgaccaactctaagtaactccagggatacgactatgaaacaaagtagcactgaatgaacgcttgatactttccagaaaatgtcctacgaattttacacataccccatcgcaaaaccacgctgcggagagaggggcgggtaatgtagcccggttgaacatgaaccagaaggaaaatggttaaagctgagggcactaattccttacaggcccggggacatggagctccaaccagtggatgcatgtagcttcccagaaccgaatgtctggccctccctggcggatgatgcctgccgcgttgcccccccccaactccctctaccggaactcagcccacgaggctgggcccacgcggcccacgtatactgcagcgtgtccgaaacgcagggagcagccccggagcagagccctcagggcttagcccagcagccgtgttcccaattcgttcgctctgcggcgcggcaatccccggtaaaccagctgcggccccatcaccaacacacaccttccttcttcgctttcggcgccatcttgtgaaaagggtctccaatgctcgttcccacgggcttatagcgccaaagagcactaaagactcgcgatgctttgtacttagagctgattgggtaatttgcagagcggcgccctctgggaacggtagttaggtttaatttctttttcgtgcgtgaacaaacatgcgccactcctcccctcaaaggcactaaagcttcatgggggttgtagttttttgttttttgttttttgttttttttttgagcgctctgtcgcccaggctggagtgcagtggcgcgatctcggctcactgtaagctccgcctcccgggtttacgccattctcctgcctcagccaccagagtagctgggactacaggcgcgtgccaccatggggattgtagttttttgaagacacgcgtttatttgctcaggccagcggacggcgtagccggctggcgctcgggtctggtcccgggagcttcctatcttgagcaactgccagtctcagggaagaggattgccatgccaggaggcaggaacgctgccaagaggaaagaacacatttggattgactcgggagttagatacagctaagttctagagtgctggagcaggatttgctcggtcgaactgaggtccagagaggaatgtggtttatcaataacacagtgatttggtggcagaaaaaaatcaagtcagggccgggcgcggtgactcacgcctgtaatcccagcactttgtgaggccgaggtggacgaattgcttcgagcccaggagttcgagaccaccctgggcaacacggcgaaaccctgtctctacaaaagaatacaaaaattagccgggcgtggtggtgcgtgcctgtagtcccagttccttgggaggctgaggtgggaggatcgcttcagccctggaggtcgaggctgcaatgagccattccagcctgggtggcagagtgagaccctgtctcaaaataaataaataaataaataaataaataatcgagtcacgagggggaagtgtcagaggaagtacaaggcggccacacctgcccctctttacctgcgacactgatactgtcaagttttactgcgtttcctgataatgcatttgaagttctatgaaaattccacacatttctccaagattcgctagtttttccggttagtaacttcactcacaatcccctgccctaaactagtcttcccttccgtgtcctggtcatctttacatcctcaaattcagctccagacacagagaaaggtttcttaacactcaggttcgcttctcctaaggtgtgtgcctaacccatccccacttgatcctttcttcttccctctcccttcataaaaccagacatgtcccctttgacggtgaaattgattgtgcactgccccctcttctatcctgcaggactttgcacaaaggagttgtccctgggggatagattccaatggggccagaacaatgaacacccataccagaggggagtccccgcctcccagagcggagaccaccccgaagagcagagtttccgggtccacttagcccttct

SEQ ID NO: 477 - DNA, 3001 bp, homo sapiens
taaggaatttttgtattttattttatattttttttaaaataagtttttaaatcgtgattatatgtgaagtaataattaatttaataaattttgagagatttagggtttttttttttttgagatagagttttatttttattgtttaggttggaatgtaatggtacgattttcgtttatcgtaatttttatttttcgggtttaagcgatttttttgttttagtttttcgcgagtagttgggattatagatatgcgttattatgttcggcgaattttttatttttaatagacgcggggtttttttatgttatttaggttggtttcgaatttttgattttaagtgattcgttttttttcggttttttaaagtgttgggattatagacgtgagttatcgcgttcggtttttgggttgattttgttagttttgtaaatgtagtagaaataatttttttatatttttaattagagaagtatattggatataatttgcgtttgagaaattattacgtagagtgagtgaatttttaaattattaatggagaatatttaaatttttttatgggtatagggggtagtattgatttgttttttttgggagcgttttttcgaggatatttgggttgttttcggagtcgtagtgttttcggtcgtcggaaggtgggtgacgtgcggatttttttttttttgtggttgtggatattttttaatattgtttttttggtttttaaagttttcgttttggttttagttttaggaggggtaggagttgggagaaaaggaaagaaaacgtgggtgcgggatttagaaatcggttattttcggttttaagaattgtagtgggttattttggttataggtgtattagtggtttttttgaagatattataagtgttaggagattaaaatttttttattatatgtacgatattagaggcgaaagcgattaattttaagtaattttagggatacgattatgaaataaagtagtattgaatgaacgtttgatattttttagaaaatgttttacgaattttatatatattttatcgtaaaattacgttgcggagagaggggcgggtaatgtagttcggttgaatatgaattagaaggaaaatggttaaagttgagggtattaattttttataggttcggggatatggagttttaattagtggatgtatgtagttttttagaatcgaatgtttggttttttttggcggatgatgtttgtcgcgttgtttttttttaattttttttatcggaatttagtttacgaggttgggtttacgcggtttacgtatattgtagcgtgttcgaaacgtagggagtagtttcggagtagagtttttagggtttagtttagtagtcgtgtttttaattcgttcgttttgcggcgcggtaattttcggtaaattagttgcggttttattattaatatatatttttttttttcgttttcggcgttattttgtgaaaagggtttttaatgttcgtttttacgggtttatagcgttaaagagtattaaagattcgcgatgttttgtatttagagttgattgggtaatttgtagagcggcgttttttgggaacggtagttaggtttaatttttttttcgtgcgtgaataaatatgcgttatttttttttttaaaggtattaaagttttatgggggttgtagttttttgttttttgttttttgttttttttttgagcgttttgtcgtttaggttggagtgtagtggcgcgatttcggtttattgtaagtttcgtttttcgggtttacgttatttttttgttttagttattagagtagttgggattataggcgcgtgttattatggggattgtagttttttgaagatacgcgtttatttgtttaggttagcggacggcgtagtcggttggcgttcgggtttggtttcgggagttttttattttgagtaattgttagttttagggaagaggattgttatgttaggaggtaggaacgttgttaagaggaaagaatatatttggattgattcgggagttagatatagttaagttttagagtgttggagtaggatttgttcggtcgaattgaggtttagagaggaatgtggtttattaataatatagtgatttggtggtagaaaaaaattaagttagggtcgggcgcggtgatttacgtttgtaattttagtattttgtgaggtcgaggtggacgaattgtttcgagtttaggagttcgagattattttgggtaatacggcgaaattttgtttttataaaagaatataaaaattagtcgggcgtggtggtgcgtgtttgtagttttagttttttgggaggttgaggtgggaggatcgttttagttttggaggtcgaggttgtaatgagttattttagtttgggtggtagagtgagattttgttttaaaataaataaataaataaataaataaataatcgagttacgagggggaagtgttagaggaagtataaggcggttatatttgtttttttttatttgcgatattgatattgttaagttttattgcgttttttgataatgtatttgaagttttatgaaaattttatatatttttttaagattcgttagttttttcggttagtaattttatttataattttttgttttaaattagttttttttttcgtgttttggttatttttatatttttaaatttagttttagatatagagaaaggttttttaatatttaggttcgttttttttaaggtgtgtgtttaatttatttttatttgattttttttttttttttttttttttataaaattagatatgttttttttgacggtgaaattgattgtgtattgtttttttttttattttgtaggattttgtataaaggagttgtttttgggggatagattttaatggggttagaataatgaatatttatattagaggggagttttcgttttttagagcggagattatttcgaagagtagagttttcgggtttatttagttttttt

SEQ ID NO: 478 - DNA, 3001 bp, homo sapiens
taaggaatttttgtattttattttatattttttttaaaataagtttttaaattgtgattatatgtgaagtaataattaatttaataaattttgagagatttagggtttttttttttttgagatagagttttatttttattgtttaggttggaatgtaatggtatgatttttgtttattgtaatttttattttttgggtttaagtgatttttttgttttagttttttgtgagtagttgggattatagatatgtgttattatgtttggtgaattttttatttttaatagatgtggggtttttttatgttatttaggttggttttgaatttttgattttaagtgatttgtttttttttggttttttaaagtgttgggattatagatgtgagttattgtgtttggtttttgggttgattttgttagttttgtaaatgtagtagaaataatttttttatatttttaattagagaagtatattggatataatttgtgtttgagaaattattatgtagagtgagtgaatttttaaattattaatggagaatatttaaatttttttatgggtatagggggtagtattgatttgttttttttgggagtgtttttttgaggatatttgggttgtttttggagttgtagtgtttttggttgttggaaggtgggtgatgtgtggatttttttttttttgtggttgtggatattttttaatattgtttttttggtttttaaagtttttgttttggttttagttttaggaggggtaggagttgggagaaaaggaaagaaaatgtgggtgtgggatttagaaattggttatttttggttttaagaattgtagtgggttattttggttataggtgtattagtggtttttttgaagatattataagtgttaggagattaaaatttttttattatatgtatgatattagaggtgaaagtgattaattttaagtaattttagggatatgattatgaaataaagtagtattgaatgaatgtttgatattttttagaaaatgttttatgaattttatatatattttattgtaaaattatgttgtggagagaggggtgggtaatgtagtttggttgaatatgaattagaaggaaaatggttaaagttgagggtattaattttttataggtttggggatatggagttttaattagtggatgtatgtagttttttagaattgaatgtttggttttttttggtggatgatgtttgttgtgttgtttttttttaattttttttattggaatttagtttatgaggttgggtttatgtggtttatgtatattgtagtgtgtttgaaatgtagggagtagttttggagtagagtttttagggtttagtttagtagttgtgtttttaatttgtttgttttgtggtgtggtaatttttggtaaattagttgtggttttattattaatatatattttttttttttgtttttggtgttattttgtgaaaagggtttttaatgtttgtttttatgggtttatagtgttaaagagtattaaagatttgtgatgttttgtatttagagttgattgggtaatttgtagagtggtgttttttgggaatggtagttaggtttaattttttttttgtgtgtgaataaatatgtgttatttttttttttaaaggtattaaagttttatgggggttgtagttttttgttttttgttttttgttttttttttgagtgttttgttgtttaggttggagtgtagtggtgtgattttggtttattgtaagttttgttttttgggtttatgttatttttttgttttagttattagagtagttgggattataggtgtgtgttattatggggattgtagttttttgaagatatgtgtttatttgtttaggttagtggatggtgtagttggttggtgtttgggtttggttttgggagttttttattttgagtaattgttagttttagggaagaggattgttatgttaggaggtaggaatgttgttaagaggaaagaatatatttggattgatttgggagttagatatagttaagttttagagtgttggagtaggatttgtttggttgaattgaggtttagagaggaatgtggtttattaataatatagtgatttggtggtagaaaaaaattaagttagggttgggtgtggtgatttatgtttgtaattttagtattttgtgaggttgaggtggatgaattgttttgagtttaggagtttgagattattttgggtaatatggtgaaattttgtttttataaaagaatataaaaattagttgggtgtggtggtgtgtgtttgtagttttagttttttgggaggttgaggtgggaggattgttttagttttggaggttgaggttgtaatgagttattttagtttgggtggtagagtgagattttgttttaaaataaataaataaataaataaataaataattgagttatgagggggaagtgttagaggaagtataaggtggttatatttgtttttttttatttgtgatattgatattgttaagttttattgtgttttttgataatgtatttgaagttttatgaaaattttatatatttttttaagatttgttagtttttttggttagtaattttatttataattttttgttttaaattagtttttttttttgtgttttggttatttttatatttttaaatttagttttagatatagagaaaggttttttaatatttaggtttgttttttttaaggtgtgtgtttaatttatttttatttgattttttttttttttttttttttttataaaattagatatgttttttttgatggtgaaattgattgtgtattgtttttttttttattttgtaggattttgtataaaggagttgtttttgggggatagattttaatggggttagaataatgaatatttatattagaggggagtttttgttttttagagtggagattattttgaagagtagagtttttgggtttatttagttttttt

SEQ ID NO: 479 - DNA, 3001 bp, homo sapiens
agaagggttaagtggattcggaaattttgtttttcggggtggttttcgttttgggaggcggggatttttttttggtatgggtgtttattgttttggttttattggaatttattttttagggataatttttttgtgtaaagttttgtaggatagaagagggggtagtgtataattaattttatcgttaaaggggatatgtttggttttatgaagggagagggaagaagaaaggattaagtggggatgggttaggtatatattttaggagaagcgaatttgagtgttaagaaatttttttttgtgtttggagttgaatttgaggatgtaaagatgattaggatacggaagggaagattagtttagggtaggggattgtgagtgaagttattaatcggaaaaattagcgaattttggagaaatgtgtggaatttttatagaattttaaatgtattattaggaaacgtagtaaaatttgatagtattagtgtcgtaggtaaagaggggtaggtgtggtcgttttgtattttttttgatatttttttttcgtgattcgattatttatttatttatttatttatttattttgagatagggttttattttgttatttaggttggaatggtttattgtagtttcgatttttagggttgaagcgatttttttattttagttttttaaggaattgggattataggtacgtattattacgttcggttaatttttgtatttttttgtagagatagggtttcgtcgtgttgtttagggtggtttcgaatttttgggttcgaagtaattcgtttatttcggttttataaagtgttgggattataggcgtgagttatcgcgttcggttttgatttgatttttttttgttattaaattattgtgttattgataaattatatttttttttggattttagttcgatcgagtaaattttgttttagtattttagaatttagttgtatttaattttcgagttaatttaaatgtgttttttttttttggtagcgtttttgttttttggtatggtaatttttttttttgagattggtagttgtttaagataggaagttttcgggattagattcgagcgttagtcggttacgtcgttcgttggtttgagtaaataaacgcgtgtttttaaaaaattataatttttatggtggtacgcgtttgtagttttagttattttggtggttgaggtaggagaatggcgtaaattcgggaggcggagtttatagtgagtcgagatcgcgttattgtattttagtttgggcgatagagcgtttaaaaaaaaaataaaaaataaaaaataaaaaattataatttttatgaagttttagtgtttttgaggggaggagtggcgtatgtttgtttacgtacgaaaaagaaattaaatttaattatcgtttttagagggcgtcgttttgtaaattatttaattagttttaagtataaagtatcgcgagtttttagtgttttttggcgttataagttcgtgggaacgagtattggagattttttttataagatggcgtcgaaagcgaagaaggaaggtgtgtgttggtgatggggtcgtagttggtttatcggggattgtcgcgtcgtagagcgaacgaattgggaatacggttgttgggttaagttttgagggttttgtttcggggttgttttttgcgtttcggatacgttgtagtatacgtgggtcgcgtgggtttagtttcgtgggttgagtttcggtagagggagttgggggggggtaacgcggtaggtattattcgttagggagggttagatattcggttttgggaagttatatgtatttattggttggagttttatgttttcgggtttgtaaggaattagtgtttttagttttaattattttttttttggtttatgtttaatcgggttatattattcgttttttttttcgtagcgtggttttgcgatggggtatgtgtaaaattcgtaggatattttttggaaagtattaagcgtttatttagtgttattttgttttatagtcgtatttttggagttatttagagttggtcgttttcgtttttggtatcgtgtatatgatggaaaagttttaattttttgatatttgtgatgtttttaaaggaattattgatgtatttgtggttagggtggtttattgtagtttttggggtcggaagtgatcgatttttaaatttcgtatttacgtttttttttttttttttttagtttttgttttttttaaagttgaagttaaagcgaaggttttaaaggttaagaaggtagtgttgaaaggtgtttatagttataaaaagaagaagattcgtacgttatttatttttcggcggtcgaagatattgcgatttcggagatagtttaaatattttcggaagagcgtttttaggagaaataagttagtattgttttttgtatttatgaaaagatttgggtattttttattggtaatttggaaatttatttattttgcgtgatggttttttaaacgtaaattgtgtttagtgtgtttttttaattggaagtatgaggagattgtttttgttgtatttataaaattggtaggattagtttagaggtcgggcgcggtggtttacgtttgtaattttagtattttgggaggtcgagggggggcggattatttgaggttaggggttcgagattagtttgagtgatatggagaaatttcgcgtttattaaaaatagaaaattcgtcgggtatggtggcgtatgtttgtaattttagttattcgcgggaggttgaggtaggagaatcgtttgaattcgggaggtggaggttgcggtgagcggagatcgtattattgtattttagtttgggtaataagagtgaaattttgttttaaaaaaaaaaaaattttgagttttttaaaatttgttaggttaattattgttttatatgtggttacggtttgaaaatttattttggggggagtataaagtagaatatagagattttttg

SEQ ID NO: 480 - DNA, 3001 bp, homo sapiens
agaagggttaagtggatttggaaattttgttttttggggtggtttttgttttgggaggtggggatttttttttggtatgggtgtttattgttttggttttattggaatttattttttagggataatttttttgtgtaaagttttgtaggatagaagagggggtagtgtataattaattttattgttaaaggggatatgtttggttttatgaagggagagggaagaagaaaggattaagtggggatgggttaggtatatattttaggagaagtgaatttgagtgttaagaaatttttttttgtgtttggagttgaatttgaggatgtaaagatgattaggatatggaagggaagattagtttagggtaggggattgtgagtgaagttattaattggaaaaattagtgaattttggagaaatgtgtggaatttttatagaattttaaatgtattattaggaaatgtagtaaaatttgatagtattagtgttgtaggtaaagaggggtaggtgtggttgttttgtattttttttgatattttttttttgtgatttgattatttatttatttatttatttatttattttgagatagggttttattttgttatttaggttggaatggtttattgtagttttgatttttagggttgaagtgatttttttattttagttttttaaggaattgggattataggtatgtattattatgtttggttaatttttgtatttttttgtagagatagggttttgttgtgttgtttagggtggttttgaatttttgggtttgaagtaatttgtttattttggttttataaagtgttgggattataggtgtgagttattgtgtttggttttgatttgatttttttttgttattaaattattgtgttattgataaattatatttttttttggattttagtttgattgagtaaattttgttttagtattttagaatttagttgtatttaatttttgagttaatttaaatgtgttttttttttttggtagtgtttttgttttttggtatggtaatttttttttttgagattggtagttgtttaagataggaagtttttgggattagatttgagtgttagttggttatgttgtttgttggtttgagtaaataaatgtgtgtttttaaaaaattataatttttatggtggtatgtgtttgtagttttagttattttggtggttgaggtaggagaatggtgtaaatttgggaggtggagtttatagtgagttgagattgtgttattgtattttagtttgggtgatagagtgtttaaaaaaaaaataaaaaataaaaaataaaaaattataatttttatgaagttttagtgtttttgaggggaggagtggtgtatgtttgtttatgtatgaaaaagaaattaaatttaattattgtttttagagggtgttgttttgtaaattatttaattagttttaagtataaagtattgtgagtttttagtgttttttggtgttataagtttgtgggaatgagtattggagattttttttataagatggtgttgaaagtgaagaaggaaggtgtgtgttggtgatggggttgtagttggtttattggggattgttgtgttgtagagtgaatgaattgggaatatggttgttgggttaagttttgagggttttgttttggggttgttttttgtgttttggatatgttgtagtatatgtgggttgtgtgggtttagttttgtgggttgagttttggtagagggagttgggggggggtaatgtggtaggtattatttgttagggagggttagatatttggttttgggaagttatatgtatttattggttggagttttatgtttttgggtttgtaaggaattagtgtttttagttttaattattttttttttggtttatgtttaattgggttatattatttgtttttttttttgtagtgtggttttgtgatggggtatgtgtaaaatttgtaggatattttttggaaagtattaagtgtttatttagtgttattttgttttatagttgtatttttggagttatttagagttggttgtttttgtttttggtattgtgtatatgatggaaaagttttaattttttgatatttgtgatgtttttaaaggaattattgatgtatttgtggttagggtggtttattgtagtttttggggttggaagtgattgatttttaaattttgtatttatgtttttttttttttttttttagtttttgttttttttaaagttgaagttaaagtgaaggttttaaaggttaagaaggtagtgttgaaaggtgtttatagttataaaaagaagaagatttgtatgttatttattttttggtggttgaagatattgtgattttggagatagtttaaatatttttggaagagtgtttttaggagaaataagttagtattgttttttgtatttatgaaaagatttgggtattttttattggtaatttggaaatttatttattttgtgtgatggttttttaaatgtaaattgtgtttagtgtgtttttttaattggaagtatgaggagattgtttttgttgtatttataaaattggtaggattagtttagaggttgggtgtggtggtttatgtttgtaattttagtattttgggaggttgagggggggtggattatttgaggttaggggtttgagattagtttgagtgatatggagaaattttgtgtttattaaaaatagaaaatttgttgggtatggtggtgtatgtttgtaattttagttatttgtgggaggttgaggtaggagaattgtttgaatttgggaggtggaggttgtggtgagtggagattgtattattgtattttagtttgggtaataagagtgaaattttgttttaaaaaaaaaaaaattttgagttttttaaaatttgttaggttaattattgttttatatgtggttatggtttgaaaatttattttggggggagtataaagtagaatatagagattttttg

SEQ ID NO: 481 - DNA, 50 bp, homo sapiens
gagcaaataaacgcgtgtcttcaaaaaactacaatccccatggtggcacg

SEQ ID NO: 482 - DNA, 50 bp, homo sapiens
gagtaaataaacgcgtgtttttaaaaaattataatttttatggtggtacg

SEQ ID NO: 483 - DNA, 50 bp, homo sapiens
gagtaaataaatgtgtgtttttaaaaaattataatttttatggtggtatg

SEQ ID NO: 484 - DNA, 50 bp, homo sapiens
cgtgttattatggggattgtagttttttgaagatacgcgtttatttgttt

SEQ ID NO: 485 - DNA, 50 bp, homo sapiens
tgtgttattatggggattgtagttttttgaagatatgtgtttatttgttt

SEQ ID NO: 486 - DNA, 3001 bp, homo sapiens
aatcggagactgctgcgcagcatctggcgatgccaggaaccagcagggaggggaaagggggagagaaggggcccaaggagaggcggcgcttccctcctcaactccaggcctgggaggtgactcatagagtctgccccctctcgcccttctgccctgggaggtcgggggtgaggatggtggaggggaagcgtgcgaagggggtgccagggttagaatgaggtgcccaccgaggagagagacgtctgaagtctggcgtcttttccttcaaggctgctgtgtagattgtgaggtgggagggctgaagatcaagttccctcgagggaggttaaagaagggctaagtggacccggaaactctgctcttcggggtggtctccgctctgggaggcggggactcccctctggtatgggtgttcattgttctggccccattggaatctatcccccagggacaactcctttgtgcaaagtcctgcaggatagaagagggggcagtgcacaatcaatttcaccgtcaaaggggacatgtctggttttatgaagggagagggaagaagaaaggatcaagtggggatgggttaggcacacaccttaggagaagcgaacctgagtgttaagaaacctttctctgtgtctggagctgaatttgaggatgtaaagatgaccaggacacggaagggaagactagtttagggcaggggattgtgagtgaagttactaaccggaaaaactagcgaatcttggagaaatgtgtggaattttcatagaacttcaaatgcattatcaggaaacgcagtaaaacttgacagtatcagtgtcgcaggtaaagaggggcaggtgtggccgccttgtacttcctctgacacttccccctcgtgactcgattatttatttatttatttatttatttattttgagacagggtctcactctgccacccaggctggaatggctcattgcagcctcgacctccagggctgaagcgatcctcccacctcagcctcccaaggaactgggactacaggcacgcaccaccacgcccggctaatttttgtattcttttgtagagacagggtttcgccgtgttgcccagggtggtctcgaactcctgggctcgaagcaattcgtccacctcggcctcacaaagtgctgggattacaggcgtgagtcaccgcgcccggccctgacttgatttttttctgccaccaaatcactgtgttattgataaaccacattcctctctggacctcagttcgaccgagcaaatcctgctccagcactctagaacttagctgtatctaactcccgagtcaatccaaatgtgttctttcctcttggcagcgttcctgcctcctggcatggcaatcctcttccctgagactggcagttgctcaagataggaagctcccgggaccagacccgagcgccagccggctacgccgtccgctggcctgagcaaataaacgcgtgtcttcaaaaaactacaatccccatggtggcacgcgcctgtagtcccagctactctggtggctgaggcaggagaatggcgtaaacccgggaggcggagcttacagtgagccgagatcgcgccactgcactccagcctgggcgacagagcgctcaaaaaaaaaacaaaaaacaaaaaacaaaaaactacaacccccatgaagctttagtgcctttgaggggaggagtggcgcatgtttgttcacgcacgaaaaagaaattaaacctaactaccgttcccagagggcgccgctctgcaaattacccaatcagctctaagtacaaagcatcgcgagtctttagtgctctttggcgctataagcccgtgggaacgagcattggagacccttttcacaagatggcgccgaaagcgaagaaggaaggtgtgtgttggtgatggggccgcagctggtttaccggggattgccgcgccgcagagcgaacgaattgggaacacggctgctgggctaagccctgagggctctgctccggggctgctccctgcgtttcggacacgctgcagtatacgtgggccgcgtgggcccagcctcgtgggctgagttccggtagagggagttgggggggggcaacgcggcaggcatcatccgccagggagggccagacattcggttctgggaagctacatgcatccactggttggagctccatgtccccgggcctgtaaggaattagtgccctcagctttaaccattttccttctggttcatgttcaaccgggctacattacccgcccctctctccgcagcgtggttttgcgatggggtatgtgtaaaattcgtaggacattttctggaaagtatcaagcgttcattcagtgctactttgtttcatagtcgtatccctggagttacttagagttggtcgctttcgcctctggtatcgtgcatatgatggaaaagttttaatctcctgacacttgtgatgtcttcaaaggaaccactgatgcacctgtggccagggtggcccactgcagttcttggggccggaagtgaccgatttctaaatcccgcacccacgttttctttccttttctcccagctcctgcccctcctaaagctgaagccaaagcgaaggctttaaaggccaagaaggcagtgttgaaaggtgtccacagccacaaaaagaagaagatccgcacgtcacccaccttccggcggccgaagacactgcgactccggagacagcccaaatatcctcggaagagcgctcccaggagaaacaagtcagtactgccccctgtacccatgaaaagatttgggtattctccattggtaatttggaaattcactcactctgcgtgatggtttctcaaacgcaaattgtgtccagtgtgcttctctaattggaagtatgaggagattgtttctgctgcatttacaaaactggcaggatcagcccagaggccgggcgcggtggctcacgtctgtaatcccagcactttgggaggccgagggggggcggatcacttgaggtca

SEQ ID NO: 487 - DNA, 3001 bp, homo sapiens
aatcggagattgttgcgtagtatttggcgatgttaggaattagtagggaggggaaagggggagagaaggggtttaaggagaggcggcgtttttttttttaattttaggtttgggaggtgatttatagagtttgttttttttcgtttttttgttttgggaggtcgggggtgaggatggtggaggggaagcgtgcgaagggggtgttagggttagaatgaggtgtttatcgaggagagagacgtttgaagtttggcgtttttttttttaaggttgttgtgtagattgtgaggtgggagggttgaagattaagttttttcgagggaggttaaagaagggttaagtggattcggaaattttgtttttcggggtggttttcgttttgggaggcggggatttttttttggtatgggtgtttattgttttggttttattggaatttattttttagggataatttttttgtgtaaagttttgtaggatagaagagggggtagtgtataattaattttatcgttaaaggggatatgtttggttttatgaagggagagggaagaagaaaggattaagtggggatgggttaggtatatattttaggagaagcgaatttgagtgttaagaaatttttttttgtgtttggagttgaatttgaggatgtaaagatgattaggatacggaagggaagattagtttagggtaggggattgtgagtgaagttattaatcggaaaaattagcgaattttggagaaatgtgtggaatttttatagaattttaaatgtattattaggaaacgtagtaaaatttgatagtattagtgtcgtaggtaaagaggggtaggtgtggtcgttttgtattttttttgatatttttttttcgtgattcgattatttatttatttatttatttatttattttgagatagggttttattttgttatttaggttggaatggtttattgtagtttcgatttttagggttgaagcgatttttttattttagttttttaaggaattgggattataggtacgtattattacgttcggttaatttttgtatttttttgtagagatagggtttcgtcgtgttgtttagggtggtttcgaatttttgggttcgaagtaattcgtttatttcggttttataaagtgttgggattataggcgtgagttatcgcgttcggttttgatttgatttttttttgttattaaattattgtgttattgataaattatatttttttttggattttagttcgatcgagtaaattttgttttagtattttagaatttagttgtatttaattttcgagttaatttaaatgtgttttttttttttggtagcgtttttgttttttggtatggtaatttttttttttgagattggtagttgtttaagataggaagttttcgggattagattcgagcgttagtcggttacgtcgttcgttggtttgagtaaataaacgcgtgtttttaaaaaattataatttttatggtggtacgcgtttgtagttttagttattttggtggttgaggtaggagaatggcgtaaattcgggaggcggagtttatagtgagtcgagatcgcgttattgtattttagtttgggcgatagagcgtttaaaaaaaaaataaaaaataaaaaataaaaaattataatttttatgaagttttagtgtttttgaggggaggagtggcgtatgtttgtttacgtacgaaaaagaaattaaatttaattatcgtttttagagggcgtcgttttgtaaattatttaattagttttaagtataaagtatcgcgagtttttagtgttttttggcgttataagttcgtgggaacgagtattggagattttttttataagatggcgtcgaaagcgaagaaggaaggtgtgtgttggtgatggggtcgtagttggtttatcggggattgtcgcgtcgtagagcgaacgaattgggaatacggttgttgggttaagttttgagggttttgtttcggggttgttttttgcgtttcggatacgttgtagtatacgtgggtcgcgtgggtttagtttcgtgggttgagtttcggtagagggagttgggggggggtaacgcggtaggtattattcgttagggagggttagatattcggttttgggaagttatatgtatttattggttggagttttatgttttcgggtttgtaaggaattagtgtttttagttttaattattttttttttggtttatgtttaatcgggttatattattcgttttttttttcgtagcgtggttttgcgatggggtatgtgtaaaattcgtaggatattttttggaaagtattaagcgtttatttagtgttattttgttttatagtcgtatttttggagttatttagagttggtcgttttcgtttttggtatcgtgtatatgatggaaaagttttaattttttgatatttgtgatgtttttaaaggaattattgatgtatttgtggttagggtggtttattgtagtttttggggtcggaagtgatcgatttttaaatttcgtatttacgtttttttttttttttttttagtttttgttttttttaaagttgaagttaaagcgaaggttttaaaggttaagaaggtagtgttgaaaggtgtttatagttataaaaagaagaagattcgtacgttatttatttttcggcggtcgaagatattgcgatttcggagatagtttaaatattttcggaagagcgtttttaggagaaataagttagtattgttttttgtatttatgaaaagatttgggtattttttattggtaatttggaaatttatttattttgcgtgatggttttttaaacgtaaattgtgtttagtgtgtttttttaattggaagtatgaggagattgtttttgttgtatttataaaattggtaggattagtttagaggtcgggcgcggtggtttacgtttgtaattttagtattttgggaggtcgagggggggcggattatttgaggtta

SEQ ID NO: 488 - DNA, 3001 bp, homo sapiens
aattggagattgttgtgtagtatttggtgatgttaggaattagtagggaggggaaagggggagagaaggggtttaaggagaggtggtgtttttttttttaattttaggtttgggaggtgatttatagagtttgtttttttttgtttttttgttttgggaggttgggggtgaggatggtggaggggaagtgtgtgaagggggtgttagggttagaatgaggtgtttattgaggagagagatgtttgaagtttggtgtttttttttttaaggttgttgtgtagattgtgaggtgggagggttgaagattaagtttttttgagggaggttaaagaagggttaagtggatttggaaattttgttttttggggtggtttttgttttgggaggtggggatttttttttggtatgggtgtttattgttttggttttattggaatttattttttagggataatttttttgtgtaaagttttgtaggatagaagagggggtagtgtataattaattttattgttaaaggggatatgtttggttttatgaagggagagggaagaagaaaggattaagtggggatgggttaggtatatattttaggagaagtgaatttgagtgttaagaaatttttttttgtgtttggagttgaatttgaggatgtaaagatgattaggatatggaagggaagattagtttagggtaggggattgtgagtgaagttattaattggaaaaattagtgaattttggagaaatgtgtggaatttttatagaattttaaatgtattattaggaaatgtagtaaaatttgatagtattagtgttgtaggtaaagaggggtaggtgtggttgttttgtattttttttgatattttttttttgtgatttgattatttatttatttatttatttatttattttgagatagggttttattttgttatttaggttggaatggtttattgtagttttgatttttagggttgaagtgatttttttattttagttttttaaggaattgggattataggtatgtattattatgtttggttaatttttgtatttttttgtagagatagggttttgttgtgttgtttagggtggttttgaatttttgggtttgaagtaatttgtttattttggttttataaagtgttgggattataggtgtgagttattgtgtttggttttgatttgatttttttttgttattaaattattgtgttattgataaattatatttttttttggattttagtttgattgagtaaattttgttttagtattttagaatttagttgtatttaatttttgagttaatttaaatgtgttttttttttttggtagtgtttttgttttttggtatggtaatttttttttttgagattggtagttgtttaagataggaagtttttgggattagatttgagtgttagttggttatgttgtttgttggtttgagtaaataaatgtgtgtttttaaaaaattataatttttatggtggtatgtgtttgtagttttagttattttggtggttgaggtaggagaatggtgtaaatttgggaggtggagtttatagtgagttgagattgtgttattgtattttagtttgggtgatagagtgtttaaaaaaaaaataaaaaataaaaaataaaaaattataatttttatgaagttttagtgtttttgaggggaggagtggtgtatgtttgtttatgtatgaaaaagaaattaaatttaattattgtttttagagggtgttgttttgtaaattatttaattagttttaagtataaagtattgtgagtttttagtgttttttggtgttataagtttgtgggaatgagtattggagattttttttataagatggtgttgaaagtgaagaaggaaggtgtgtgttggtgatggggttgtagttggtttattggggattgttgtgttgtagagtgaatgaattgggaatatggttgttgggttaagttttgagggttttgttttggggttgttttttgtgttttggatatgttgtagtatatgtgggttgtgtgggtttagttttgtgggttgagttttggtagagggagttgggggggggtaatgtggtaggtattatttgttagggagggttagatatttggttttgggaagttatatgtatttattggttggagttttatgtttttgggtttgtaaggaattagtgtttttagttttaattattttttttttggtttatgtttaattgggttatattatttgtttttttttttgtagtgtggttttgtgatggggtatgtgtaaaatttgtaggatattttttggaaagtattaagtgtttatttagtgttattttgttttatagttgtatttttggagttatttagagttggttgtttttgtttttggtattgtgtatatgatggaaaagttttaattttttgatatttgtgatgtttttaaaggaattattgatgtatttgtggttagggtggtttattgtagtttttggggttggaagtgattgatttttaaattttgtatttatgtttttttttttttttttttagtttttgttttttttaaagttgaagttaaagtgaaggttttaaaggttaagaaggtagtgttgaaaggtgtttatagttataaaaagaagaagatttgtatgttatttattttttggtggttgaagatattgtgattttggagatagtttaaatatttttggaagagtgtttttaggagaaataagttagtattgttttttgtatttatgaaaagatttgggtattttttattggtaatttggaaatttatttattttgtgtgatggttttttaaatgtaaattgtgtttagtgtgtttttttaattggaagtatgaggagattgtttttgttgtatttataaaattggtaggattagtttagaggttgggtgtggtggtttatgtttgtaattttagtattttgggaggttgagggggggtggattatttgaggtta

SEQ ID NO: 489 - DNA, 3001 bp, homo sapiens
tgattttaagtgattcgttttttttcggttttttaaagtgttgggattatagacgtgagttatcgcgttcggtttttgggttgattttgttagttttgtaaatgtagtagaaataatttttttatatttttaattagagaagtatattggatataatttgcgtttgagaaattattacgtagagtgagtgaatttttaaattattaatggagaatatttaaatttttttatgggtatagggggtagtattgatttgttttttttgggagcgttttttcgaggatatttgggttgttttcggagtcgtagtgttttcggtcgtcggaaggtgggtgacgtgcggatttttttttttttgtggttgtggatattttttaatattgtttttttggtttttaaagttttcgttttggttttagttttaggaggggtaggagttgggagaaaaggaaagaaaacgtgggtgcgggatttagaaatcggttattttcggttttaagaattgtagtgggttattttggttataggtgtattagtggtttttttgaagatattataagtgttaggagattaaaatttttttattatatgtacgatattagaggcgaaagcgattaattttaagtaattttagggatacgattatgaaataaagtagtattgaatgaacgtttgatattttttagaaaatgttttacgaattttatatatattttatcgtaaaattacgttgcggagagaggggcgggtaatgtagttcggttgaatatgaattagaaggaaaatggttaaagttgagggtattaattttttataggttcggggatatggagttttaattagtggatgtatgtagttttttagaatcgaatgtttggttttttttggcggatgatgtttgtcgcgttgtttttttttaattttttttatcggaatttagtttacgaggttgggtttacgcggtttacgtatattgtagcgtgttcgaaacgtagggagtagtttcggagtagagtttttagggtttagtttagtagtcgtgtttttaattcgttcgttttgcggcgcggtaattttcggtaaattagttgcggttttattattaatatatatttttttttttcgttttcggcgttattttgtgaaaagggtttttaatgttcgtttttacgggtttatagcgttaaagagtattaaagattcgcgatgttttgtatttagagttgattgggtaatttgtagagcggcgttttttgggaacggtagttaggtttaatttttttttcgtgcgtgaataaatatgcgttatttttttttttaaaggtattaaagttttatgggggttgtagttttttgttttttgttttttgttttttttttgagcgttttgtcgtttaggttggagtgtagtggcgcgatttcggtttattgtaagtttcgtttttcgggtttacgttatttttttgttttagttattagagtagttgggattataggcgcgtgttattatggggattgtagttttttgaagatacgcgtttatttgtttaggttagcggacggcgtagtcggttggcgttcgggtttggtttcgggagttttttattttgagtaattgttagttttagggaagaggattgttatgttaggaggtaggaacgttgttaagaggaaagaatatatttggattgattcgggagttagatatagttaagttttagagtgttggagtaggatttgttcggtcgaattgaggtttagagaggaatgtggtttattaataatatagtgatttggtggtagaaaaaaattaagttagggtcgggcgcggtgatttacgtttgtaattttagtattttgtgaggtcgaggtggacgaattgtttcgagtttaggagttcgagattattttgggtaatacggcgaaattttgtttttataaaagaatataaaaattagtcgggcgtggtggtgcgtgtttgtagttttagttttttgggaggttgaggtgggaggatcgttttagttttggaggtcgaggttgtaatgagttattttagtttgggtggtagagtgagattttgttttaaaataaataaataaataaataaataaataatcgagttacgagggggaagtgttagaggaagtataaggcggttatatttgtttttttttatttgcgatattgatattgttaagttttattgcgttttttgataatgtatttgaagttttatgaaaattttatatatttttttaagattcgttagttttttcggttagtaattttatttataattttttgttttaaattagttttttttttcgtgttttggttatttttatatttttaaatttagttttagatatagagaaaggttttttaatatttaggttcgttttttttaaggtgtgtgtttaatttatttttatttgattttttttttttttttttttttttataaaattagatatgttttttttgacggtgaaattgattgtgtattgtttttttttttattttgtaggattttgtataaaggagttgtttttgggggatagattttaatggggttagaataatgaatatttatattagaggggagttttcgttttttagagcggagattatttcgaagagtagagttttcgggtttatttagtttttttttaatttttttcgagggaatttgatttttagtttttttattttataatttatatagtagttttgaaggaaaagacgttagattttagacgttttttttttcggtgggtattttattttaattttggtatttttttcgtacgttttttttttattatttttattttcgattttttagggtagaagggcgagagggggtagattttatgagttattttttaggtttggagttgaggagggaagcgtcgtttttttttgggtttttttttttttttttttttttttttgttggtttttggtatcgttagatgttgcgtagtagttttcgatt

SEQ ID NO: 490 - DNA, 3001 bp, homo sapiens
tgattttaagtgatttgtttttttttggttttttaaagtgttgggattatagatgtgagttattgtgtttggtttttgggttgattttgttagttttgtaaatgtagtagaaataatttttttatatttttaattagagaagtatattggatataatttgtgtttgagaaattattatgtagagtgagtgaatttttaaattattaatggagaatatttaaatttttttatgggtatagggggtagtattgatttgttttttttgggagtgtttttttgaggatatttgggttgtttttggagttgtagtgtttttggttgttggaaggtgggtgatgtgtggatttttttttttttgtggttgtggatattttttaatattgtttttttggtttttaaagtttttgttttggttttagttttaggaggggtaggagttgggagaaaaggaaagaaaatgtgggtgtgggatttagaaattggttatttttggttttaagaattgtagtgggttattttggttataggtgtattagtggtttttttgaagatattataagtgttaggagattaaaatttttttattatatgtatgatattagaggtgaaagtgattaattttaagtaattttagggatatgattatgaaataaagtagtattgaatgaatgtttgatattttttagaaaatgttttatgaattttatatatattttattgtaaaattatgttgtggagagaggggtgggtaatgtagtttggttgaatatgaattagaaggaaaatggttaaagttgagggtattaattttttataggtttggggatatggagttttaattagtggatgtatgtagttttttagaattgaatgtttggttttttttggtggatgatgtttgttgtgttgtttttttttaattttttttattggaatttagtttatgaggttgggtttatgtggtttatgtatattgtagtgtgtttgaaatgtagggagtagttttggagtagagtttttagggtttagtttagtagttgtgtttttaatttgtttgttttgtggtgtggtaatttttggtaaattagttgtggttttattattaatatatattttttttttttgtttttggtgttattttgtgaaaagggtttttaatgtttgtttttatgggtttatagtgttaaagagtattaaagatttgtgatgttttgtatttagagttgattgggtaatttgtagagtggtgttttttgggaatggtagttaggtttaattttttttttgtgtgtgaataaatatgtgttatttttttttttaaaggtattaaagttttatgggggttgtagttttttgttttttgttttttgttttttttttgagtgttttgttgtttaggttggagtgtagtggtgtgattttggtttattgtaagttttgttttttgggtttatgttatttttttgttttagttattagagtagttgggattataggtgtgtgttattatggggattgtagttttttgaagatatgtgtttatttgtttaggttagtggatggtgtagttggttggtgtttgggtttggttttgggagttttttattttgagtaattgttagttttagggaagaggattgttatgttaggaggtaggaatgttgttaagaggaaagaatatatttggattgatttgggagttagatatagttaagttttagagtgttggagtaggatttgtttggttgaattgaggtttagagaggaatgtggtttattaataatatagtgatttggtggtagaaaaaaattaagttagggttgggtgtggtgatttatgtttgtaattttagtattttgtgaggttgaggtggatgaattgttttgagtttaggagtttgagattattttgggtaatatggtgaaattttgtttttataaaagaatataaaaattagttgggtgtggtggtgtgtgtttgtagttttagttttttgggaggttgaggtgggaggattgttttagttttggaggttgaggttgtaatgagttattttagtttgggtggtagagtgagattttgttttaaaataaataaataaataaataaataaataattgagttatgagggggaagtgttagaggaagtataaggtggttatatttgtttttttttatttgtgatattgatattgttaagttttattgtgttttttgataatgtatttgaagttttatgaaaattttatatatttttttaagatttgttagtttttttggttagtaattttatttataattttttgttttaaattagtttttttttttgtgttttggttatttttatatttttaaatttagttttagatatagagaaaggttttttaatatttaggtttgttttttttaaggtgtgtgtttaatttatttttatttgattttttttttttttttttttttttataaaattagatatgttttttttgatggtgaaattgattgtgtattgtttttttttttattttgtaggattttgtataaaggagttgtttttgggggatagattttaatggggttagaataatgaatatttatattagaggggagtttttgttttttagagtggagattattttgaagagtagagtttttgggtttatttagtttttttttaattttttttgagggaatttgatttttagtttttttattttataatttatatagtagttttgaaggaaaagatgttagattttagatgtttttttttttggtgggtattttattttaattttggtattttttttgtatgttttttttttattatttttatttttgattttttagggtagaagggtgagagggggtagattttatgagttattttttaggtttggagttgaggagggaagtgttgtttttttttgggtttttttttttttttttttttttttttgttggtttttggtattgttagatgttgtgtagtagtttttgatt

SEQ ID NO: 491 - DNA, 50 bp, homo sapiens
taatgaactgaactgaaaattcaggctcatgtgaccagctgctctgaacg

SEQ ID NO: 492 - DNA, 50 bp, homo sapiens
taatgaattgaattgaaaatttaggtttatgtgattagttgttttgaacg

SEQ ID NO: 493 - DNA, 50 bp, homo sapiens
taatgaattgaattgaaaatttaggtttatgtgattagttgttttgaatg

SEQ ID NO: 494 - DNA, 50 bp, homo sapiens
cgtttagagtagttggttatatgagtttgaatttttagtttagtttatta

SEQ ID NO: 495 - DNA, 50 bp, homo sapiens
tgtttagagtagttggttatatgagtttgaatttttagtttagtttatta

SEQ ID NO: 496 - DNA, 3001 bp, homo sapiens
tagattccaatattaccattctattgtaatctatagggatgccatattaatcatatttaacctttccaggcattatgctttcttaggagtccatattcaataaataaatgctgaaaagttattttctcatctaacctaataatccatattgttaaaaaaatgttttatcaaacatttcctagatgtcataacttgcttaaaattgtatcctcatataatggtgaggataccattaccaaataccctggtgtttctactgtattcatcatgtacaatcctataattatagtcatgttgtcttaacttagtgttataaatcactacaatttctataacattttcatatatgaacaaaattaatagctttctcattattgaatagaatcagatgtgataagtgacctcaaatgttttatttagaggcttaaagacaaagaactctaaacgagtatccagcatcttttgaaaggatacctaaaggggcaagaaaaaaaattatctttcccccatgagcaagagaaggggagctgggtggtaagtaaggatgcaaggttttcaggactgttaacagttgagagtgtaggttctttctacctctccctgatcctcccagccctcccccataacaatgaggatgctggtgaaatactagcggacaggatctgaccataccttcatgggtaggctctgggtcaggtgtaagtgagatgtcatccagctctcgcaggcagagccattctccatccatggacactcggaatttgcaaaggtagatggtctccatggcagcctgtgtgatcttgtcagtggtgggggttggcatatcggtcggaggcgtcagagcagacatgatgactcagctgggaccacaacacacacacagacacacacacactcacacacacacaccaaaaaaataaatacaacctcctcaccaaaaaaacccaatacaaagctctgaaacaaagctttcaggaaaagggtgggggaggtttaaaaaaaaaaaaaaggaaaaataccttataggttaagaacaaactgctcaagataaacaattctacactatcttatagacagttcctaccacatagcaaaataagatgatgcttgtcttctcccagcttcctctccttttatcttcccttccctgccccccaccttttttttcagctgagctataggctttaaatcccgcacagctgatgctgccttagctggctttaaaaatctggcctcgatatgagtaagtgaaaaatcctcctcctttgtgcagaaaaaaaatataaaagaaaaacctgaacaaaaaataaacctatattttcaatgtagcttaaaaaaaaaatcctgagctgcagaaatcacttccaggatctgctcagatgagctgggatgctgagttctcataggattggccgtgcgcagtaagcagggtgttgaccaaaatggctgactaatgaactgaactgaaaattcaggctcatgtgaccagctgctctgaacgtagggcaagcaattcccaggatgctttatagatgctgctgatgctgggagagcaattaggcttctctctctcatcctgtacaacccacttccagactgtgctagtcaaactgtgatcagacataacacaatgcacatatcctcatcaattcttcttactttgggatcaaggactgaataaaaggatgacaattaataccggataataatctatagtaaagatggtaaaagaggcagttagattaatttaacaagcatataattcacctctttcattcttatctacatagctattaaaattctttactatgctaaatgttatgttttaagaaaagctaaagcataaaaaattgaggttctcagagggaaaaaaaacaaaaagataaaaagaaaagctaaagtagattttcaatttaaatatcttattcttgggcatttataatttccttctccaaggtacaaaaacctgaccttttaggttaggcagaaatgcaaaaaaaaaacttcaagttaaaaaagtaaaatctttcccaattaatggcaatttcccccctttttgattttgttgtatttatcaagtttctgtattaagcataaaatacgtttctttttttttcttttttcttttttgagacagagtcttgctctgtagcccaggctggagtgcagtggcgtgatctcagctcccaggtccaagcaattctctgcctcagcctcccgagtagctgggattacaggcacccaccaccacgcccagctaatttttgtatttttagtagagacggggtttcaccatcttggccaggctggtcttgaacttctgacctcatgatcctcccacctcagcctcccaaagtgctgggattacaggcgtgagccaccatgcccagccttaagcatgaaatatgtttctaagcagattaaaccatgttatatttttaaaatcctcccattcgataagatactgaagacaattatattttcttaatacacacacacacacacacacacacacacacacacacacacacacacggccctatattatccaatgaggcatttataccttggtagcaaaagggcaggtacttgctttatgaactacataaattacaaagagaagaataagaattttctttgaaaatgttttggacaattgaaagaaagtgtttgtttgtttttgtattgaagggttccaattttaaggaggaacatacaaattcaagaaatatgacctgagactattcctttctagggattgttatcagagggacatcttgatttacctaatttctgaaaactaaaaaaattctccttgaatattgttaaaatctcaaatgcttcatcataatttgagactgaactgaaagaaaaaaatgctaataatcaaattctgtagagaaactggcattttcatattgttacgaagacagggcggatggctgggcgcggtggctcatgcctataataccagcactttgggaggccaaggcgggcaaat

SEQ ID NO: 497 - DNA, 3001 bp, homo sapiens
tagattttaatattattattttattgtaatttatagggatgttatattaattatatttaatttttttaggtattatgtttttttaggagtttatatttaataaataaatgttgaaaagttatttttttatttaatttaataatttatattgttaaaaaaatgttttattaaatattttttagatgttataatttgtttaaaattgtatttttatataatggtgaggatattattattaaatattttggtgtttttattgtatttattatgtataattttataattatagttatgttgttttaatttagtgttataaattattataatttttataatatttttatatatgaataaaattaatagtttttttattattgaatagaattagatgtgataagtgattttaaatgttttatttagaggtttaaagataaagaattttaaacgagtatttagtattttttgaaaggatatttaaaggggtaagaaaaaaaattattttttttttatgagtaagagaaggggagttgggtggtaagtaaggatgtaaggtttttaggattgttaatagttgagagtgtaggttttttttatttttttttgatttttttagtttttttttataataatgaggatgttggtgaaatattagcggataggatttgattatatttttatgggtaggttttgggttaggtgtaagtgagatgttatttagttttcgtaggtagagttattttttatttatggatattcggaatttgtaaaggtagatggtttttatggtagtttgtgtgattttgttagtggtgggggttggtatatcggtcggaggcgttagagtagatatgatgatttagttgggattataatatatatatagatatatatatatttatatatatatattaaaaaaataaatataatttttttattaaaaaaatttaatataaagttttgaaataaagtttttaggaaaagggtgggggaggtttaaaaaaaaaaaaaaggaaaaatattttataggttaagaataaattgtttaagataaataattttatattattttatagatagtttttattatatagtaaaataagatgatgtttgtttttttttagttttttttttttttatttttttttttttgttttttatttttttttttagttgagttataggttttaaatttcgtatagttgatgttgttttagttggttttaaaaatttggtttcgatatgagtaagtgaaaaattttttttttttgtgtagaaaaaaaatataaaagaaaaatttgaataaaaaataaatttatatttttaatgtagtttaaaaaaaaaattttgagttgtagaaattatttttaggatttgtttagatgagttgggatgttgagtttttataggattggtcgtgcgtagtaagtagggtgttgattaaaatggttgattaatgaattgaattgaaaatttaggtttatgtgattagttgttttgaacgtagggtaagtaatttttaggatgttttatagatgttgttgatgttgggagagtaattaggttttttttttttattttgtataatttatttttagattgtgttagttaaattgtgattagatataatataatgtatatatttttattaattttttttattttgggattaaggattgaataaaaggatgataattaatatcggataataatttatagtaaagatggtaaaagaggtagttagattaatttaataagtatataatttattttttttatttttatttatatagttattaaaattttttattatgttaaatgttatgttttaagaaaagttaaagtataaaaaattgaggtttttagagggaaaaaaaataaaaagataaaaagaaaagttaaagtagatttttaatttaaatattttatttttgggtatttataatttttttttttaaggtataaaaatttgattttttaggttaggtagaaatgtaaaaaaaaaattttaagttaaaaaagtaaaattttttttaattaatggtaattttttttttttttgattttgttgtatttattaagtttttgtattaagtataaaatacgtttttttttttttttttttttttttttgagatagagttttgttttgtagtttaggttggagtgtagtggcgtgattttagtttttaggtttaagtaattttttgttttagtttttcgagtagttgggattataggtatttattattacgtttagttaatttttgtatttttagtagagacggggttttattattttggttaggttggttttgaatttttgattttatgatttttttattttagttttttaaagtgttgggattataggcgtgagttattatgtttagttttaagtatgaaatatgtttttaagtagattaaattatgttatatttttaaaatttttttattcgataagatattgaagataattatatttttttaatatatatatatatatatatatatatatatatatatatatatatatacggttttatattatttaatgaggtatttatattttggtagtaaaagggtaggtatttgttttatgaattatataaattataaagagaagaataagaattttttttgaaaatgttttggataattgaaagaaagtgtttgtttgtttttgtattgaagggttttaattttaaggaggaatatataaatttaagaaatatgatttgagattatttttttttagggattgttattagagggatattttgatttatttaatttttgaaaattaaaaaaattttttttgaatattgttaaaattttaaatgttttattataatttgagattgaattgaaagaaaaaaatgttaataattaaattttgtagagaaattggtatttttatattgttacgaagatagggcggatggttgggcgcggtggtttatgtttataatattagtattttgggaggttaaggcgggtaaat

SEQ ID NO: 498 - DNA, 3001 bp, homo sapiens
tagattttaatattattattttattgtaatttatagggatgttatattaattatatttaatttttttaggtattatgtttttttaggagtttatatttaataaataaatgttgaaaagttatttttttatttaatttaataatttatattgttaaaaaaatgttttattaaatattttttagatgttataatttgtttaaaattgtatttttatataatggtgaggatattattattaaatattttggtgtttttattgtatttattatgtataattttataattatagttatgttgttttaatttagtgttataaattattataatttttataatatttttatatatgaataaaattaatagtttttttattattgaatagaattagatgtgataagtgattttaaatgttttatttagaggtttaaagataaagaattttaaatgagtatttagtattttttgaaaggatatttaaaggggtaagaaaaaaaattattttttttttatgagtaagagaaggggagttgggtggtaagtaaggatgtaaggtttttaggattgttaatagttgagagtgtaggttttttttatttttttttgatttttttagtttttttttataataatgaggatgttggtgaaatattagtggataggatttgattatatttttatgggtaggttttgggttaggtgtaagtgagatgttatttagtttttgtaggtagagttattttttatttatggatatttggaatttgtaaaggtagatggtttttatggtagtttgtgtgattttgttagtggtgggggttggtatattggttggaggtgttagagtagatatgatgatttagttgggattataatatatatatagatatatatatatttatatatatatattaaaaaaataaatataatttttttattaaaaaaatttaatataaagttttgaaataaagtttttaggaaaagggtgggggaggtttaaaaaaaaaaaaaaggaaaaatattttataggttaagaataaattgtttaagataaataattttatattattttatagatagtttttattatatagtaaaataagatgatgtttgtttttttttagttttttttttttttatttttttttttttgttttttatttttttttttagttgagttataggttttaaattttgtatagttgatgttgttttagttggttttaaaaatttggttttgatatgagtaagtgaaaaattttttttttttgtgtagaaaaaaaatataaaagaaaaatttgaataaaaaataaatttatatttttaatgtagtttaaaaaaaaaattttgagttgtagaaattatttttaggatttgtttagatgagttgggatgttgagtttttataggattggttgtgtgtagtaagtagggtgttgattaaaatggttgattaatgaattgaattgaaaatttaggtttatgtgattagttgttttgaatgtagggtaagtaatttttaggatgttttatagatgttgttgatgttgggagagtaattaggttttttttttttattttgtataatttatttttagattgtgttagttaaattgtgattagatataatataatgtatatatttttattaattttttttattttgggattaaggattgaataaaaggatgataattaatattggataataatttatagtaaagatggtaaaagaggtagttagattaatttaataagtatataatttattttttttatttttatttatatagttattaaaattttttattatgttaaatgttatgttttaagaaaagttaaagtataaaaaattgaggtttttagagggaaaaaaaataaaaagataaaaagaaaagttaaagtagatttttaatttaaatattttatttttgggtatttataatttttttttttaaggtataaaaatttgattttttaggttaggtagaaatgtaaaaaaaaaattttaagttaaaaaagtaaaattttttttaattaatggtaattttttttttttttgattttgttgtatttattaagtttttgtattaagtataaaatatgtttttttttttttttttttttttttttgagatagagttttgttttgtagtttaggttggagtgtagtggtgtgattttagtttttaggtttaagtaattttttgttttagttttttgagtagttgggattataggtatttattattatgtttagttaatttttgtatttttagtagagatggggttttattattttggttaggttggttttgaatttttgattttatgatttttttattttagttttttaaagtgttgggattataggtgtgagttattatgtttagttttaagtatgaaatatgtttttaagtagattaaattatgttatatttttaaaatttttttatttgataagatattgaagataattatatttttttaatatatatatatatatatatatatatatatatatatatatatatatatggttttatattatttaatgaggtatttatattttggtagtaaaagggtaggtatttgttttatgaattatataaattataaagagaagaataagaattttttttgaaaatgttttggataattgaaagaaagtgtttgtttgtttttgtattgaagggttttaattttaaggaggaatatataaatttaagaaatatgatttgagattatttttttttagggattgttattagagggatattttgatttatttaatttttgaaaattaaaaaaattttttttgaatattgttaaaattttaaatgttttattataatttgagattgaattgaaagaaaaaaatgttaataattaaattttgtagagaaattggtatttttatattgttatgaagatagggtggatggttgggtgtggtggtttatgtttataatattagtattttgggaggttaaggtgggtaaat

SEQ ID NO: 499 - DNA, 3001 bp, homo sapiens
atttgttcgttttggttttttaaagtgttggtattataggtatgagttatcgcgtttagttattcgttttgttttcgtaataatatgaaaatgttagtttttttatagaatttgattattagtattttttttttttagtttagttttaaattatgatgaagtatttgagattttaataatatttaaggagaatttttttagtttttagaaattaggtaaattaagatgtttttttgataataatttttagaaaggaatagttttaggttatattttttgaatttgtatgtttttttttaaaattggaattttttaatataaaaataaataaatatttttttttaattgtttaaaatatttttaaagaaaatttttatttttttttttgtaatttatgtagtttataaagtaagtatttgtttttttgttattaaggtataaatgttttattggataatatagggtcgtgtgtgtgtgtgtgtgtgtgtgtgtgtgtgtgtgtgtgtgtgtgtattaagaaaatataattgtttttagtattttatcgaatgggaggattttaaaaatataatatggtttaatttgtttagaaatatattttatgtttaaggttgggtatggtggtttacgtttgtaattttagtattttgggaggttgaggtgggaggattatgaggttagaagtttaagattagtttggttaagatggtgaaatttcgtttttattaaaaatataaaaattagttgggcgtggtggtgggtgtttgtaattttagttattcgggaggttgaggtagagaattgtttggatttgggagttgagattacgttattgtattttagtttgggttatagagtaagattttgttttaaaaaagaaaaaagaaaaaaaaagaaacgtattttatgtttaatatagaaatttgataaatataataaaattaaaaaggggggaaattgttattaattgggaaagattttatttttttaatttgaagttttttttttgtatttttgtttaatttaaaaggttaggtttttgtattttggagaaggaaattataaatgtttaagaataagatatttaaattgaaaatttattttagtttttttttttatttttttgttttttttttttttgagaattttaattttttatgttttagttttttttaaaatataatatttagtatagtaaagaattttaatagttatgtagataagaatgaaagaggtgaattatatgtttgttaaattaatttaattgttttttttattatttttattatagattattattcggtattaattgttatttttttatttagtttttgattttaaagtaagaagaattgatgaggatatgtgtattgtgttatgtttgattatagtttgattagtatagtttggaagtgggttgtataggatgagagagagaagtttaattgtttttttagtattagtagtatttataaagtattttgggaattgtttgttttacgtttagagtagttggttatatgagtttgaatttttagtttagtttattagttagttattttggttaatattttgtttattgcgtacggttaattttatgagaatttagtattttagtttatttgagtagattttggaagtgatttttgtagtttaggattttttttttaagttatattgaaaatataggtttattttttgtttaggttttttttttatattttttttttgtataaaggaggaggattttttatttatttatatcgaggttagatttttaaagttagttaaggtagtattagttgtgcgggatttaaagtttatagtttagttgaaaaaaaaggtggggggtagggaagggaagataaaaggagaggaagttgggagaagataagtattattttattttgttatgtggtaggaattgtttataagatagtgtagaattgtttattttgagtagtttgtttttaatttataaggtatttttttttttttttttttttaaattttttttattttttttttgaaagttttgttttagagttttgtattgggtttttttggtgaggaggttgtatttatttttttggtgtgtgtgtgtgagtgtgtgtgtgtttgtgtgtgtgttgtggttttagttgagttattatgtttgttttgacgttttcgatcgatatgttaatttttattattgataagattatataggttgttatggagattatttatttttgtaaatttcgagtgtttatggatggagaatggttttgtttgcgagagttggatgatattttatttatatttgatttagagtttatttatgaaggtatggttagattttgttcgttagtattttattagtatttttattgttatgggggagggttgggaggattagggagaggtagaaagaatttatatttttaattgttaatagttttgaaaattttgtatttttatttattatttagtttttttttttttgtttatgggggaaagataatttttttttttgtttttttaggtatttttttaaaagatgttggatattcgtttagagttttttgtttttaagtttttaaataaaatatttgaggttatttattatatttgattttatttaataatgagaaagttattaattttgtttatatatgaaaatgttatagaaattgtagtgatttataatattaagttaagataatatgattataattataggattgtatatgatgaatatagtagaaatattagggtatttggtaatggtatttttattattatatgaggatataattttaagtaagttatgatatttaggaaatgtttgataaaatatttttttaataatatggattattaggttagatgagaaaataattttttagtatttatttattgaatatggatttttaagaaagtataatgtttggaaaggttaaatatgattaatatggtatttttatagattataatagaatggtaatattggaattta

SEQ ID NO: 500 - DNA, 3001 bp, homo sapiens
atttgtttgttttggttttttaaagtgttggtattataggtatgagttattgtgtttagttatttgttttgtttttgtaataatatgaaaatgttagtttttttatagaatttgattattagtattttttttttttagtttagttttaaattatgatgaagtatttgagattttaataatatttaaggagaatttttttagtttttagaaattaggtaaattaagatgtttttttgataataatttttagaaaggaatagttttaggttatattttttgaatttgtatgtttttttttaaaattggaattttttaatataaaaataaataaatatttttttttaattgtttaaaatatttttaaagaaaatttttatttttttttttgtaatttatgtagtttataaagtaagtatttgtttttttgttattaaggtataaatgttttattggataatatagggttgtgtgtgtgtgtgtgtgtgtgtgtgtgtgtgtgtgtgtgtgtgtgtattaagaaaatataattgtttttagtattttattgaatgggaggattttaaaaatataatatggtttaatttgtttagaaatatattttatgtttaaggttgggtatggtggtttatgtttgtaattttagtattttgggaggttgaggtgggaggattatgaggttagaagtttaagattagtttggttaagatggtgaaattttgtttttattaaaaatataaaaattagttgggtgtggtggtgggtgtttgtaattttagttatttgggaggttgaggtagagaattgtttggatttgggagttgagattatgttattgtattttagtttgggttatagagtaagattttgttttaaaaaagaaaaaagaaaaaaaaagaaatgtattttatgtttaatatagaaatttgataaatataataaaattaaaaaggggggaaattgttattaattgggaaagattttatttttttaatttgaagttttttttttgtatttttgtttaatttaaaaggttaggtttttgtattttggagaaggaaattataaatgtttaagaataagatatttaaattgaaaatttattttagtttttttttttatttttttgttttttttttttttgagaattttaattttttatgttttagttttttttaaaatataatatttagtatagtaaagaattttaatagttatgtagataagaatgaaagaggtgaattatatgtttgttaaattaatttaattgttttttttattatttttattatagattattatttggtattaattgttatttttttatttagtttttgattttaaagtaagaagaattgatgaggatatgtgtattgtgttatgtttgattatagtttgattagtatagtttggaagtgggttgtataggatgagagagagaagtttaattgtttttttagtattagtagtatttataaagtattttgggaattgtttgttttatgtttagagtagttggttatatgagtttgaatttttagtttagtttattagttagttattttggttaatattttgtttattgtgtatggttaattttatgagaatttagtattttagtttatttgagtagattttggaagtgatttttgtagtttaggattttttttttaagttatattgaaaatataggtttattttttgtttaggttttttttttatattttttttttgtataaaggaggaggattttttatttatttatattgaggttagatttttaaagttagttaaggtagtattagttgtgtgggatttaaagtttatagtttagttgaaaaaaaaggtggggggtagggaagggaagataaaaggagaggaagttgggagaagataagtattattttattttgttatgtggtaggaattgtttataagatagtgtagaattgtttattttgagtagtttgtttttaatttataaggtatttttttttttttttttttttaaattttttttattttttttttgaaagttttgttttagagttttgtattgggtttttttggtgaggaggttgtatttatttttttggtgtgtgtgtgtgagtgtgtgtgtgtttgtgtgtgtgttgtggttttagttgagttattatgtttgttttgatgtttttgattgatatgttaatttttattattgataagattatataggttgttatggagattatttatttttgtaaattttgagtgtttatggatggagaatggttttgtttgtgagagttggatgatattttatttatatttgatttagagtttatttatgaaggtatggttagattttgtttgttagtattttattagtatttttattgttatgggggagggttgggaggattagggagaggtagaaagaatttatatttttaattgttaatagttttgaaaattttgtatttttatttattatttagtttttttttttttgtttatgggggaaagataatttttttttttgtttttttaggtatttttttaaaagatgttggatatttgtttagagttttttgtttttaagtttttaaataaaatatttgaggttatttattatatttgattttatttaataatgagaaagttattaattttgtttatatatgaaaatgttatagaaattgtagtgatttataatattaagttaagataatatgattataattataggattgtatatgatgaatatagtagaaatattagggtatttggtaatggtatttttattattatatgaggatataattttaagtaagttatgatatttaggaaatgtttgataaaatatttttttaataatatggattattaggttagatgagaaaataattttttagtatttatttattgaatatggatttttaagaaagtataatgtttggaaaggttaaatatgattaatatggtatttttatagattataatagaatggtaatattggaattta

SEQ ID NO: 501 - DNA, 50 bp, homo sapiens
gactgtgaatgcgacctgttcgagagaactcatcaggtgcgagaagcccg

SEQ ID NO: 502 - DNA, 50 bp, homo sapiens
gattgtgaatgcgatttgttcgagagaatttattaggtgcgagaagttcg

SEQ ID NO: 503 - DNA, 50 bp, homo sapiens
gattgtgaatgtgatttgtttgagagaatttattaggtgtgagaagtttg

SEQ ID NO: 504 - DNA, 50 bp, homo sapiens
cgggtttttcgtatttgatgagttttttcgaataggtcgtatttatagtt

SEQ ID NO: 505 - DNA, 50 bp, homo sapiens
tgggttttttgtatttgatgagtttttttgaataggttgtatttatagtt

SEQ ID NO: 506 - DNA, 3001 bp, homo sapiens
cacctttccacggggctagggatgatgggggggcgagaccccacaccgtatggacaccttattttagtttctgccaaatctgccgggatggcttctcattcccactcgctacctcgggctgctccgagagtttcaaacgctgtgccactcgcttcagctggcagtggcgattatcggggtttcctctccccgcagccagagttcccgcgccgctagtctttggcagataacccaacaagcaagtgaatgtcccgctccgaatctcaggaagtctctaaaacaataaaagagacggacggaatccgttagcagagcctgctcccgggggaggcggcgaggctgcgcgcccagagtagcgctcagcggtcccggcaggtgcgggggcagtggagggggcccggcggttcgcccggaggacggcctcggctccgctccggccaacgttcccccctccaagaaacttttctttcactctgagaggctccgtgttgccatgaaaacggattttccaaggggcccgaccctccccctcaggggcatcggactggaaaaaccgaaatggccacagagcagagacaaaaaggggccgctaagcgggggccaggatcgagagagcggaggccagttcaccccctacgtcccacacatactttccacaccaccttgtgcgagcgcctccgacaggctcaggagacgggcgactgactgcttgcccgccctcctgcaaacccccaagagcctcacagccgaatgcaccccgcagtcctgaagcctgtctcccatgcccgggcccctgacccacgctgcgtcctggacgcactggccctcctagagaaagatctggacaaccagcggccaattccagggagagcttcttggagacgcagccaggagcacttccaatgagcctggagtccctaagccggcctgggtagctggtggtgccctgcgttcctagcgctggcagcagaagcggccagaaaacctccgtgcagacaacgggaagctttgcgggctggccgggggatggggcgccggtctgccttgacagggttgcaaagttgttttctaaattccgaaggcgcccctctgccccctccccccaatctgcttgcgtgccccctcccccctccccccgtcacctcctcaggtttcgttctttcaaactttttgaaaccctaattggtggcctctgagtgggcctcgtggactcccgcctcctaagtaactcttaccacgtcactaggccaaagaggggcgtggggtgaacgaaagggctccccgaacttttttttttccagccaggccgaacgggggctcggtaatgattggccagggcgcatcactgcgaacctgtcaatcacgggtcctccgggttgcgaggggcggaccaagccccaaccccggggaatccgagcaggtatataaggggcccagctagagcccaggcagactgtgaatgcgacctgttcgagagaactcatcaggtgcgagaagcccgcgggttcctgctgatttggcgcggagcattttgataagcctacccttcccgccggactcgctggcccacaggcccccaagctccgctccgacggagtcccagggccttttcaccgtggccgctccagccccgggagcgccttctcctcccgccacgctggcgcaccttcttcccgccccggcaatgtacagccttctggagactgaactcaagaaccccgtagggacacccacacaagcggcgggcaccggcggccccgcagccccgggaggcgcaggcaagagtagtgcgaacgcagccggcggcgcgaactcgggcggcggcagcagcggtggtgcgagcggaggtggcgggggtacagaccaggaccgtgtgaaacggcccatgaacgccttcatggtatggtcccgcgggcagcggcgcaaaatggccctggagaaccccaagatgcacaattctgagatcagcaagcgcttgggcgccgactggaaactgctgaccgacgccgagaagcgaccattcatcgacgaggccaagcgacttcgcgccgtgcacatgaaggagtatccggactacaagtaccgaccgcgccgcaagaccaagacgctgctcaagaaagataagtactccctgcccagcggcctcctgcctcccggtgccgcggccgccgccgccgctgccgcggccgcagccgctgccgccagcagtccggtgggcgtgggccagcgcctggacacgtacacgcacgtgaacggctgggccaacggcgcgtactcgctggtgcaggagcagctgggctacgcgcagcccccgagcatgagcagcccgccgccgccgcccgcgctgccgccgatgcaccgctacgacatggccggcctgcagtacagcccaatgatgccgcccggcgctcagagctacatgaacgtcgctgccgcggccgccgccgcctcgggctacgggggcatggcgccctcagccacagcagccgcggccgccgcctacgggcagcagcccgccaccgccgcggccgcagctgcggccgcagccgccatgagcctgggccccatgggctcggtagtgaagtctgagcccagctcgccgccgcccgccatcgcatcgcactctcagcgcgcgtgcctcggcgacctgcgcgacatgatcagcatgtacctgccacccggcggggacgcggccgacgccgcctctccgctgcccggcggtcgcctgcacggcgtgcaccagcactaccagggcgccgggactgcagtcaacggaacggtgccgctgacccacatctgagcaccggcctgcgctcgtccacccttgttccccacccccacccccactcccgccccgcacccccaagttgggacgccttgtttagctttgcttgcctgggactgttgccttgtaccgatgatggggagggctgaaagttttgctgtagctgtcgggttttgtacaaaagcaaaaataagtcaggagcagcgaaaatgggac

SEQ ID NO: 507 - DNA, 3001 bp, homo sapiens
tatttttttacggggttagggatgatgggggggcgagattttatatcgtatggatattttattttagtttttgttaaatttgtcgggatggttttttatttttattcgttatttcgggttgtttcgagagttttaaacgttgtgttattcgttttagttggtagtggcgattatcggggtttttttttttcgtagttagagttttcgcgtcgttagtttttggtagataatttaataagtaagtgaatgtttcgtttcgaattttaggaagtttttaaaataataaaagagacggacggaattcgttagtagagtttgttttcgggggaggcggcgaggttgcgcgtttagagtagcgtttagcggtttcggtaggtgcgggggtagtggagggggttcggcggttcgttcggaggacggtttcggtttcgtttcggttaacgtttttttttttaagaaattttttttttattttgagaggtttcgtgttgttatgaaaacggattttttaaggggttcgatttttttttttaggggtatcggattggaaaaatcgaaatggttatagagtagagataaaaaggggtcgttaagcgggggttaggatcgagagagcggaggttagtttattttttacgttttatatatattttttatattattttgtgcgagcgttttcgataggtttaggagacgggcgattgattgtttgttcgtttttttgtaaatttttaagagttttatagtcgaatgtatttcgtagttttgaagtttgttttttatgttcgggtttttgatttacgttgcgttttggacgtattggtttttttagagaaagatttggataattagcggttaattttagggagagttttttggagacgtagttaggagtatttttaatgagtttggagtttttaagtcggtttgggtagttggtggtgttttgcgtttttagcgttggtagtagaagcggttagaaaattttcgtgtagataacgggaagttttgcgggttggtcgggggatggggcgtcggtttgttttgatagggttgtaaagttgttttttaaatttcgaaggcgtttttttgttttttttttttaatttgtttgcgtgttttttttttttttttttcgttatttttttaggtttcgtttttttaaattttttgaaattttaattggtggtttttgagtgggtttcgtggattttcgttttttaagtaatttttattacgttattaggttaaagaggggcgtggggtgaacgaaagggtttttcgaatttttttttttttagttaggtcgaacgggggttcggtaatgattggttagggcgtattattgcgaatttgttaattacgggtttttcgggttgcgaggggcggattaagttttaatttcggggaattcgagtaggtatataaggggtttagttagagtttaggtagattgtgaatgcgatttgttcgagagaatttattaggtgcgagaagttcgcgggtttttgttgatttggcgcggagtattttgataagtttatttttttcgtcggattcgttggtttataggtttttaagtttcgtttcgacggagttttagggtttttttatcgtggtcgttttagtttcgggagcgtttttttttttcgttacgttggcgtatttttttttcgtttcggtaatgtatagttttttggagattgaatttaagaatttcgtagggatatttatataagcggcgggtatcggcggtttcgtagtttcgggaggcgtaggtaagagtagtgcgaacgtagtcggcggcgcgaattcgggcggcggtagtagcggtggtgcgagcggaggtggcgggggtatagattaggatcgtgtgaaacggtttatgaacgtttttatggtatggtttcgcgggtagcggcgtaaaatggttttggagaattttaagatgtataattttgagattagtaagcgtttgggcgtcgattggaaattgttgatcgacgtcgagaagcgattatttatcgacgaggttaagcgatttcgcgtcgtgtatatgaaggagtattcggattataagtatcgatcgcgtcgtaagattaagacgttgtttaagaaagataagtattttttgtttagcggttttttgtttttcggtgtcgcggtcgtcgtcgtcgttgtcgcggtcgtagtcgttgtcgttagtagttcggtgggcgtgggttagcgtttggatacgtatacgtacgtgaacggttgggttaacggcgcgtattcgttggtgtaggagtagttgggttacgcgtagttttcgagtatgagtagttcgtcgtcgtcgttcgcgttgtcgtcgatgtatcgttacgatatggtcggtttgtagtatagtttaatgatgtcgttcggcgtttagagttatatgaacgtcgttgtcgcggtcgtcgtcgtttcgggttacgggggtatggcgtttttagttatagtagtcgcggtcgtcgtttacgggtagtagttcgttatcgtcgcggtcgtagttgcggtcgtagtcgttatgagtttgggttttatgggttcggtagtgaagtttgagtttagttcgtcgtcgttcgttatcgtatcgtatttttagcgcgcgtgtttcggcgatttgcgcgatatgattagtatgtatttgttattcggcggggacgcggtcgacgtcgttttttcgttgttcggcggtcgtttgtacggcgtgtattagtattattagggcgtcgggattgtagttaacggaacggtgtcgttgatttatatttgagtatcggtttgcgttcgtttatttttgttttttatttttatttttattttcgtttcgtatttttaagttgggacgttttgtttagttttgtttgtttgggattgttgttttgtatcgatgatggggagggttgaaagttttgttgtagttgtcgggttttgtataaaagtaaaaataagttaggagtagcgaaaatgggat

SEQ ID NO: 508 - DNA, 3001 bp, homo sapiens
tatttttttatggggttagggatgatgggggggtgagattttatattgtatggatattttattttagtttttgttaaatttgttgggatggttttttatttttatttgttattttgggttgttttgagagttttaaatgttgtgttatttgttttagttggtagtggtgattattggggttttttttttttgtagttagagtttttgtgttgttagtttttggtagataatttaataagtaagtgaatgttttgttttgaattttaggaagtttttaaaataataaaagagatggatggaatttgttagtagagtttgtttttgggggaggtggtgaggttgtgtgtttagagtagtgtttagtggttttggtaggtgtgggggtagtggagggggtttggtggtttgtttggaggatggttttggttttgttttggttaatgtttttttttttaagaaattttttttttattttgagaggttttgtgttgttatgaaaatggattttttaaggggtttgatttttttttttaggggtattggattggaaaaattgaaatggttatagagtagagataaaaaggggttgttaagtgggggttaggattgagagagtggaggttagtttattttttatgttttatatatattttttatattattttgtgtgagtgtttttgataggtttaggagatgggtgattgattgtttgtttgtttttttgtaaatttttaagagttttatagttgaatgtattttgtagttttgaagtttgttttttatgtttgggtttttgatttatgttgtgttttggatgtattggtttttttagagaaagatttggataattagtggttaattttagggagagttttttggagatgtagttaggagtatttttaatgagtttggagtttttaagttggtttgggtagttggtggtgttttgtgtttttagtgttggtagtagaagtggttagaaaatttttgtgtagataatgggaagttttgtgggttggttgggggatggggtgttggtttgttttgatagggttgtaaagttgttttttaaattttgaaggtgtttttttgttttttttttttaatttgtttgtgtgtttttttttttttttttttgttatttttttaggttttgtttttttaaattttttgaaattttaattggtggtttttgagtgggttttgtggatttttgttttttaagtaatttttattatgttattaggttaaagaggggtgtggggtgaatgaaagggttttttgaatttttttttttttagttaggttgaatgggggtttggtaatgattggttagggtgtattattgtgaatttgttaattatgggttttttgggttgtgaggggtggattaagttttaattttggggaatttgagtaggtatataaggggtttagttagagtttaggtagattgtgaatgtgatttgtttgagagaatttattaggtgtgagaagtttgtgggtttttgttgatttggtgtggagtattttgataagtttattttttttgttggatttgttggtttataggtttttaagttttgttttgatggagttttagggtttttttattgtggttgttttagttttgggagtgttttttttttttgttatgttggtgtattttttttttgttttggtaatgtatagttttttggagattgaatttaagaattttgtagggatatttatataagtggtgggtattggtggttttgtagttttgggaggtgtaggtaagagtagtgtgaatgtagttggtggtgtgaatttgggtggtggtagtagtggtggtgtgagtggaggtggtgggggtatagattaggattgtgtgaaatggtttatgaatgtttttatggtatggttttgtgggtagtggtgtaaaatggttttggagaattttaagatgtataattttgagattagtaagtgtttgggtgttgattggaaattgttgattgatgttgagaagtgattatttattgatgaggttaagtgattttgtgttgtgtatatgaaggagtatttggattataagtattgattgtgttgtaagattaagatgttgtttaagaaagataagtattttttgtttagtggttttttgttttttggtgttgtggttgttgttgttgttgttgtggttgtagttgttgttgttagtagtttggtgggtgtgggttagtgtttggatatgtatatgtatgtgaatggttgggttaatggtgtgtatttgttggtgtaggagtagttgggttatgtgtagtttttgagtatgagtagtttgttgttgttgtttgtgttgttgttgatgtattgttatgatatggttggtttgtagtatagtttaatgatgttgtttggtgtttagagttatatgaatgttgttgttgtggttgttgttgttttgggttatgggggtatggtgtttttagttatagtagttgtggttgttgtttatgggtagtagtttgttattgttgtggttgtagttgtggttgtagttgttatgagtttgggttttatgggtttggtagtgaagtttgagtttagtttgttgttgtttgttattgtattgtatttttagtgtgtgtgttttggtgatttgtgtgatatgattagtatgtatttgttatttggtggggatgtggttgatgttgtttttttgttgtttggtggttgtttgtatggtgtgtattagtattattagggtgttgggattgtagttaatggaatggtgttgttgatttatatttgagtattggtttgtgtttgtttatttttgttttttatttttatttttatttttgttttgtatttttaagttgggatgttttgtttagttttgtttgtttgggattgttgttttgtattgatgatggggagggttgaaagttttgttgtagttgttgggttttgtataaaagtaaaaataagttaggagtagtgaaaatgggat

SEQ ID NO: 509 - DNA, 3001 bp, homo sapiens
gttttattttcgttgtttttgatttatttttgtttttgtataaaattcgatagttatagtaaaatttttagttttttttattatcggtataaggtaatagttttaggtaagtaaagttaaataaggcgttttaatttgggggtgcggggcgggagtgggggtgggggtggggaataagggtggacgagcgtaggtcggtgtttagatgtgggttagcggtatcgtttcgttgattgtagtttcggcgttttggtagtgttggtgtacgtcgtgtaggcgatcgtcgggtagcggagaggcggcgtcggtcgcgttttcgtcgggtggtaggtatatgttgattatgtcgcgtaggtcgtcgaggtacgcgcgttgagagtgcgatgcgatggcgggcggcggcgagttgggtttagattttattatcgagtttatggggtttaggtttatggcggttgcggtcgtagttgcggtcgcggcggtggcgggttgttgttcgtaggcggcggtcgcggttgttgtggttgagggcgttatgttttcgtagttcgaggcggcggcggtcgcggtagcgacgtttatgtagttttgagcgtcgggcggtattattgggttgtattgtaggtcggttatgtcgtagcggtgtatcggcggtagcgcgggcggcggcggcgggttgtttatgttcgggggttgcgcgtagtttagttgtttttgtattagcgagtacgcgtcgttggtttagtcgtttacgtgcgtgtacgtgtttaggcgttggtttacgtttatcggattgttggcggtagcggttgcggtcgcggtagcggcggcggcggtcgcggtatcgggaggtaggaggtcgttgggtagggagtatttattttttttgagtagcgttttggttttgcggcgcggtcggtatttgtagttcggatatttttttatgtgtacggcgcgaagtcgtttggtttcgtcgatgaatggtcgtttttcggcgtcggttagtagtttttagtcggcgtttaagcgtttgttgattttagaattgtgtattttggggttttttagggttattttgcgtcgttgttcgcgggattatattatgaaggcgtttatgggtcgttttatacggttttggtttgtattttcgttattttcgttcgtattatcgttgttgtcgtcgttcgagttcgcgtcgtcggttgcgttcgtattatttttgtttgcgtttttcggggttgcggggtcgtcggtgttcgtcgtttgtgtgggtgtttttacggggtttttgagtttagtttttagaaggttgtatattgtcggggcgggaagaaggtgcgttagcgtggcgggaggagaaggcgttttcggggttggagcggttacggtgaaaaggttttgggatttcgtcggagcggagtttgggggtttgtgggttagcgagttcggcgggaagggtaggtttattaaaatgtttcgcgttaaattagtaggaattcgcgggtttttcgtatttgatgagttttttcgaataggtcgtatttatagtttgtttgggttttagttgggttttttatatatttgttcggatttttcggggttggggtttggttcgtttttcgtaattcggaggattcgtgattgataggttcgtagtgatgcgttttggttaattattatcgagttttcgttcggtttggttggaaaaaaaaaagttcggggagttttttcgtttattttacgtttttttttggtttagtgacgtggtaagagttatttaggaggcgggagtttacgaggtttatttagaggttattaattagggttttaaaaagtttgaaagaacgaaatttgaggaggtgacggggggaggggggagggggtacgtaagtagattggggggagggggtagaggggcgttttcggaatttagaaaataattttgtaattttgttaaggtagatcggcgttttatttttcggttagttcgtaaagtttttcgttgtttgtacggaggttttttggtcgtttttgttgttagcgttaggaacgtagggtattattagttatttaggtcggtttagggattttaggtttattggaagtgtttttggttgcgtttttaagaagttttttttggaattggtcgttggttgtttagatttttttttaggagggttagtgcgtttaggacgtagcgtgggttaggggttcgggtatgggagataggttttaggattgcggggtgtattcggttgtgaggtttttgggggtttgtaggagggcgggtaagtagttagtcgttcgttttttgagtttgtcggaggcgttcgtataaggtggtgtggaaagtatgtgtgggacgtagggggtgaattggttttcgttttttcgattttggttttcgtttagcggtttttttttgtttttgttttgtggttatttcggtttttttagttcgatgtttttgagggggagggtcgggttttttggaaaattcgtttttatggtaatacggagttttttagagtgaaagaaaagttttttggaggggggaacgttggtcggagcggagtcgaggtcgtttttcgggcgaatcgtcgggttttttttattgttttcgtatttgtcgggatcgttgagcgttattttgggcgcgtagtttcgtcgtttttttcgggagtaggttttgttaacggatttcgttcgttttttttattgttttagagattttttgagattcggagcgggatatttatttgtttgttgggttatttgttaaagattagcggcgcgggaattttggttgcggggagaggaaatttcgataatcgttattgttagttgaagcgagtggtatagcgtttgaaattttcggagtagttcgaggtagcgagtgggaatgagaagttatttcggtagatttggtagaaattaaaataaggtgtttatacggtgtggggtttcgtttttttattatttttagtttcgtggaaaggtg

SEQ ID NO: 510 - DNA, 3001 bp, homo sapiens
gttttatttttgttgtttttgatttatttttgtttttgtataaaatttgatagttatagtaaaatttttagttttttttattattggtataaggtaatagttttaggtaagtaaagttaaataaggtgttttaatttgggggtgtggggtgggagtgggggtgggggtggggaataagggtggatgagtgtaggttggtgtttagatgtgggttagtggtattgttttgttgattgtagttttggtgttttggtagtgttggtgtatgttgtgtaggtgattgttgggtagtggagaggtggtgttggttgtgtttttgttgggtggtaggtatatgttgattatgttgtgtaggttgttgaggtatgtgtgttgagagtgtgatgtgatggtgggtggtggtgagttgggtttagattttattattgagtttatggggtttaggtttatggtggttgtggttgtagttgtggttgtggtggtggtgggttgttgtttgtaggtggtggttgtggttgttgtggttgagggtgttatgtttttgtagtttgaggtggtggtggttgtggtagtgatgtttatgtagttttgagtgttgggtggtattattgggttgtattgtaggttggttatgttgtagtggtgtattggtggtagtgtgggtggtggtggtgggttgtttatgtttgggggttgtgtgtagtttagttgtttttgtattagtgagtatgtgttgttggtttagttgtttatgtgtgtgtatgtgtttaggtgttggtttatgtttattggattgttggtggtagtggttgtggttgtggtagtggtggtggtggttgtggtattgggaggtaggaggttgttgggtagggagtatttattttttttgagtagtgttttggttttgtggtgtggttggtatttgtagtttggatatttttttatgtgtatggtgtgaagttgtttggttttgttgatgaatggttgttttttggtgttggttagtagtttttagttggtgtttaagtgtttgttgattttagaattgtgtattttggggttttttagggttattttgtgttgttgtttgtgggattatattatgaaggtgtttatgggttgttttatatggttttggtttgtatttttgttatttttgtttgtattattgttgttgttgttgtttgagtttgtgttgttggttgtgtttgtattatttttgtttgtgttttttggggttgtggggttgttggtgtttgttgtttgtgtgggtgtttttatggggtttttgagtttagtttttagaaggttgtatattgttggggtgggaagaaggtgtgttagtgtggtgggaggagaaggtgtttttggggttggagtggttatggtgaaaaggttttgggattttgttggagtggagtttgggggtttgtgggttagtgagtttggtgggaagggtaggtttattaaaatgttttgtgttaaattagtaggaatttgtgggttttttgtatttgatgagtttttttgaataggttgtatttatagtttgtttgggttttagttgggttttttatatatttgtttggattttttggggttggggtttggtttgttttttgtaatttggaggatttgtgattgataggtttgtagtgatgtgttttggttaattattattgagtttttgtttggtttggttggaaaaaaaaaagtttggggagtttttttgtttattttatgtttttttttggtttagtgatgtggtaagagttatttaggaggtgggagtttatgaggtttatttagaggttattaattagggttttaaaaagtttgaaagaatgaaatttgaggaggtgatggggggaggggggagggggtatgtaagtagattggggggagggggtagaggggtgtttttggaatttagaaaataattttgtaattttgttaaggtagattggtgttttattttttggttagtttgtaaagttttttgttgtttgtatggaggttttttggttgtttttgttgttagtgttaggaatgtagggtattattagttatttaggttggtttagggattttaggtttattggaagtgtttttggttgtgtttttaagaagttttttttggaattggttgttggttgtttagatttttttttaggagggttagtgtgtttaggatgtagtgtgggttaggggtttgggtatgggagataggttttaggattgtggggtgtatttggttgtgaggtttttgggggtttgtaggagggtgggtaagtagttagttgtttgttttttgagtttgttggaggtgtttgtataaggtggtgtggaaagtatgtgtgggatgtagggggtgaattggtttttgtttttttgattttggtttttgtttagtggtttttttttgtttttgttttgtggttattttggtttttttagtttgatgtttttgagggggagggttgggttttttggaaaatttgtttttatggtaatatggagttttttagagtgaaagaaaagttttttggaggggggaatgttggttggagtggagttgaggttgttttttgggtgaattgttgggttttttttattgtttttgtatttgttgggattgttgagtgttattttgggtgtgtagttttgttgttttttttgggagtaggttttgttaatggattttgtttgttttttttattgttttagagattttttgagatttggagtgggatatttatttgtttgttgggttatttgttaaagattagtggtgtgggaattttggttgtggggagaggaaattttgataattgttattgttagttgaagtgagtggtatagtgtttgaaatttttggagtagtttgaggtagtgagtgggaatgagaagttattttggtagatttggtagaaattaaaataaggtgtttatatggtgtggggttttgtttttttattatttttagttttgtggaaaggtg

SEQ ID NO: 511 - DNA, 50 bp, homo sapiens
tgagaagtgctaaaccaggggtttgcccgccaggccgaggaggaccgtcg

SEQ ID NO: 512 - DNA, 50 bp, homo sapiens
tgagaagtgttaaattaggggtttgttcgttaggtcgaggaggatcgtcg

SEQ ID NO: 513 - DNA, 50 bp, homo sapiens
tgagaagtgttaaattaggggtttgtttgttaggttgaggaggattgttg

SEQ ID NO: 514 - DNA, 50 bp, homo sapiens
cgacggtttttttcggtttggcgggtaaatttttggtttagtatttttta

SEQ ID NO: 515 - DNA, 50 bp, homo sapiens
tgatggttttttttggtttggtgggtaaatttttggtttagtatttttta

SEQ ID NO: 516 - DNA, 3001 bp, homo sapiens
gagtcccgcggtaattcttaaagcacctgcaccgcccccccgccgcctgcagagggcgcagcaggtcttgcacctcttctgcatctcattctccaggcttcagacctgtctccctcattcaaaaaatatttattatcgagctcttacttgctacccagcactgatataggcactcaggaatacaacaatgaataagatagtagaaaaattctatatcctcataaggcttacgtttccatgtactgaaagcaatgaacaaataaatcttatcagagtgataagggttgtgaaggagattaaataagatggtgtgatataaagtatctgggagaaaacgttagggtgtgatattacggaaagccttcctaaaaaatgacattttaactgatgagaagaaaggatccagctgagagcaaacgcaaaagctttcttccttccacccttcatatttgacacaatgcaggattcctccaaaatgatttccaccaattctgccctcacagctctggcttgcagaattttccaccccaaaatgttagtatctacggcaccaggtcggcgagaatcctgactctgcaccctcctccccaactccatttcctttgcttcctccggcaggcggattacttgcccttacttgtcatggcgactgtccagctttgtgccaggagcctcgcaggggttgatgggattggggttttcccctcccatgtgctcaagactggcgctaaaagttttgagcttctcaaaagtctagagccaccgtccagggagcaggtagctgctgggctccggggacactttgcgttcgggctgggagcgtgctttccacgacggtgacacgcttccctggattgggtaagctcctgactgaacttgatgagtcctctctgagtcacgggctctcggctccgtgtattttcagctcgggaaaatcgctggggctgggggtggggcagtggggacttagcgagtttgggggtgagtgggatggaagcttggctagagggatcatcataggagttgcattgttgggagacctgggtgtagatgatggggatgttaggaccatccgaactcaaagttgaacgcctaggcagaggagtggagctttggggaaccttgagccggcctaaagcgtacttctttgcacatccacccggtgctgggcgtagggaatccctgaaataaaagatgcacaaagcattgaggtctgagacttttggatctcgaaacattgagaactcatagctgtatattttagagcccatggcatcctagtgaaaactggggctccattccgaaatgatcatttgggggtgatccggggagcccaagctgctaaggtcccacaacttccggacctttgtccttcctggagcgatctttccaggcagcccccggctccgctagatggagaaaatccaattgaaggctgtcagtcgtggaagtgagaagtgctaaaccaggggtttgcccgccaggccgaggaggaccgtcgcaatctgagaggcccggcagccctgttattgtttggctccacatttacatttctgcctcttgcagcagcatttccggtttctttttgccggagcagctcactattcacccgatgagaggggaggagagagagagaaaatgtcctttaggccggttcctcttacttggcagagggaggctgctattctccgcctgcatttctttttctggattacttagttatggcctttgcaaaggcaggggtatttgttttgatgcaaacctcaatccctccccttctttgaatggtgtgccccaccccgcgggtcgcctgcaacctaggcggacgctaccatggcgtgagacagggagggaaagaagtgtgcagaaggcaagcccggaggtattttcaagaatgagtatatctcatcttcccggaggaaaaaaaaaaagaatgggtacgtctgagaatcaaattttgaaagagtgcaatgatgggtcgtttgataatttgtcggaaaaacaatctacctgttatctagctttgggctaggccattccagttccagacgcaggctgaacgtcgtgaagcggaaggggcgggcccgcaggcgtccgtgtggtcctccgtgcagccctccggcccgagccggttcttcctggtaggaggcggaactcgaattcatttctcccgctgccccatctcttagctcgcggttgtttcattccgcagtttcttcccatgcacctgccgcgtaccggccactttgtgccgtacttacgtcatctttttcctaaatcgaggtggcatttacacacagcgccagtgcacacagcaagtgcacaggaagatgagttttggcccctaaccgctccgtgatgcctaccaagtcacagacccttttcatcgtcccagaaacgtttcatcacgtctcttcccagtcgattcccgaccccacctttattttgatctccataaccattttgcctgttggagaacttcatatagaatggaatcaggctgggcgctgtggctcacgcctgcactttgggaggccgaggcgggcggattacttgaggataggagttccagaccagcgtggccaacgtggtgaatccccgtctctactaaaaaatacaaaaattagctgggcgtggtgggtgcctgtaatcccagctattcgggagggtgaggcaggagaatcgcttgaacccgggaggcagaggttgcagtgagccaagatcgtgccactacactccagcctgggcgacaagaacgaaactccgtctcaaaaaaaaggggggaatcatacattatgtgctcatttttgtcgggcttctgtccttcaatgtactgtctgacattcgttcatgttgtatatatcagtattttgctccttttcatttagtatagtccatcgattgtatatccgtccttttgatggccttttgagttgtttcccatttgcggttatgaaataaagctgctataaacattcttgtacaattctttttgtgatca

SEQ ID NO: 517 - DNA, 3001 bp, homo sapiens
gagtttcgcggtaatttttaaagtatttgtatcgttttttcgtcgtttgtagagggcgtagtaggttttgtattttttttgtattttattttttaggttttagatttgttttttttatttaaaaaatatttattatcgagtttttatttgttatttagtattgatataggtatttaggaatataataatgaataagatagtagaaaaattttatatttttataaggtttacgtttttatgtattgaaagtaatgaataaataaattttattagagtgataagggttgtgaaggagattaaataagatggtgtgatataaagtatttgggagaaaacgttagggtgtgatattacggaaagtttttttaaaaaatgatattttaattgatgagaagaaaggatttagttgagagtaaacgtaaaagtttttttttttttattttttatatttgatataatgtaggatttttttaaaatgatttttattaattttgtttttatagttttggtttgtagaattttttattttaaaatgttagtatttacggtattaggtcggcgagaattttgattttgtatttttttttttaattttattttttttgtttttttcggtaggcggattatttgtttttatttgttatggcgattgtttagttttgtgttaggagtttcgtaggggttgatgggattggggttttttttttttatgtgtttaagattggcgttaaaagttttgagttttttaaaagtttagagttatcgtttagggagtaggtagttgttgggtttcggggatattttgcgttcgggttgggagcgtgttttttacgacggtgatacgtttttttggattgggtaagtttttgattgaatttgatgagttttttttgagttacgggttttcggtttcgtgtatttttagttcgggaaaatcgttggggttgggggtggggtagtggggatttagcgagtttgggggtgagtgggatggaagtttggttagagggattattataggagttgtattgttgggagatttgggtgtagatgatggggatgttaggattattcgaatttaaagttgaacgtttaggtagaggagtggagttttggggaattttgagtcggtttaaagcgtatttttttgtatatttattcggtgttgggcgtagggaatttttgaaataaaagatgtataaagtattgaggtttgagatttttggatttcgaaatattgagaatttatagttgtatattttagagtttatggtattttagtgaaaattggggttttatttcgaaatgattatttgggggtgattcggggagtttaagttgttaaggttttataattttcggatttttgttttttttggagcgatttttttaggtagttttcggtttcgttagatggagaaaatttaattgaaggttgttagtcgtggaagtgagaagtgttaaattaggggtttgttcgttaggtcgaggaggatcgtcgtaatttgagaggttcggtagttttgttattgtttggttttatatttatatttttgttttttgtagtagtattttcggtttttttttgtcggagtagtttattatttattcgatgagaggggaggagagagagagaaaatgttttttaggtcggttttttttatttggtagagggaggttgttatttttcgtttgtatttttttttttggattatttagttatggtttttgtaaaggtaggggtatttgttttgatgtaaattttaatttttttttttttttgaatggtgtgttttatttcgcgggtcgtttgtaatttaggcggacgttattatggcgtgagatagggagggaaagaagtgtgtagaaggtaagttcggaggtatttttaagaatgagtatattttattttttcggaggaaaaaaaaaaagaatgggtacgtttgagaattaaattttgaaagagtgtaatgatgggtcgtttgataatttgtcggaaaaataatttatttgttatttagttttgggttaggttattttagttttagacgtaggttgaacgtcgtgaagcggaaggggcgggttcgtaggcgttcgtgtggtttttcgtgtagtttttcggttcgagtcggttttttttggtaggaggcggaattcgaatttatttttttcgttgttttattttttagttcgcggttgttttatttcgtagtttttttttatgtatttgtcgcgtatcggttattttgtgtcgtatttacgttattttttttttaaatcgaggtggtatttatatatagcgttagtgtatatagtaagtgtataggaagatgagttttggtttttaatcgtttcgtgatgtttattaagttatagattttttttatcgttttagaaacgttttattacgtttttttttagtcgattttcgattttatttttattttgatttttataattattttgtttgttggagaattttatatagaatggaattaggttgggcgttgtggtttacgtttgtattttgggaggtcgaggcgggcggattatttgaggataggagttttagattagcgtggttaacgtggtgaattttcgtttttattaaaaaatataaaaattagttgggcgtggtgggtgtttgtaattttagttattcgggagggtgaggtaggagaatcgtttgaattcgggaggtagaggttgtagtgagttaagatcgtgttattatattttagtttgggcgataagaacgaaatttcgttttaaaaaaaaggggggaattatatattatgtgtttatttttgtcgggtttttgttttttaatgtattgtttgatattcgtttatgttgtatatattagtattttgtttttttttatttagtatagtttatcgattgtatattcgtttttttgatggttttttgagttgttttttatttgcggttatgaaataaagttgttataaatatttttgtataattttttttgtgatta

SEQ ID NO: 518 - DNA, 3001 bp, homo sapiens
gagttttgtggtaatttttaaagtatttgtattgtttttttgttgtttgtagagggtgtagtaggttttgtattttttttgtattttattttttaggttttagatttgttttttttatttaaaaaatatttattattgagtttttatttgttatttagtattgatataggtatttaggaatataataatgaataagatagtagaaaaattttatatttttataaggtttatgtttttatgtattgaaagtaatgaataaataaattttattagagtgataagggttgtgaaggagattaaataagatggtgtgatataaagtatttgggagaaaatgttagggtgtgatattatggaaagtttttttaaaaaatgatattttaattgatgagaagaaaggatttagttgagagtaaatgtaaaagtttttttttttttattttttatatttgatataatgtaggatttttttaaaatgatttttattaattttgtttttatagttttggtttgtagaattttttattttaaaatgttagtatttatggtattaggttggtgagaattttgattttgtatttttttttttaattttattttttttgttttttttggtaggtggattatttgtttttatttgttatggtgattgtttagttttgtgttaggagttttgtaggggttgatgggattggggttttttttttttatgtgtttaagattggtgttaaaagttttgagttttttaaaagtttagagttattgtttagggagtaggtagttgttgggttttggggatattttgtgtttgggttgggagtgtgttttttatgatggtgatatgtttttttggattgggtaagtttttgattgaatttgatgagttttttttgagttatgggtttttggttttgtgtatttttagtttgggaaaattgttggggttgggggtggggtagtggggatttagtgagtttgggggtgagtgggatggaagtttggttagagggattattataggagttgtattgttgggagatttgggtgtagatgatggggatgttaggattatttgaatttaaagttgaatgtttaggtagaggagtggagttttggggaattttgagttggtttaaagtgtatttttttgtatatttatttggtgttgggtgtagggaatttttgaaataaaagatgtataaagtattgaggtttgagatttttggattttgaaatattgagaatttatagttgtatattttagagtttatggtattttagtgaaaattggggttttattttgaaatgattatttgggggtgatttggggagtttaagttgttaaggttttataatttttggatttttgttttttttggagtgatttttttaggtagtttttggttttgttagatggagaaaatttaattgaaggttgttagttgtggaagtgagaagtgttaaattaggggtttgtttgttaggttgaggaggattgttgtaatttgagaggtttggtagttttgttattgtttggttttatatttatatttttgttttttgtagtagtatttttggtttttttttgttggagtagtttattatttatttgatgagaggggaggagagagagagaaaatgttttttaggttggttttttttatttggtagagggaggttgttattttttgtttgtatttttttttttggattatttagttatggtttttgtaaaggtaggggtatttgttttgatgtaaattttaatttttttttttttttgaatggtgtgttttattttgtgggttgtttgtaatttaggtggatgttattatggtgtgagatagggagggaaagaagtgtgtagaaggtaagtttggaggtatttttaagaatgagtatattttatttttttggaggaaaaaaaaaaagaatgggtatgtttgagaattaaattttgaaagagtgtaatgatgggttgtttgataatttgttggaaaaataatttatttgttatttagttttgggttaggttattttagttttagatgtaggttgaatgttgtgaagtggaaggggtgggtttgtaggtgtttgtgtggttttttgtgtagttttttggtttgagttggttttttttggtaggaggtggaatttgaatttattttttttgttgttttattttttagtttgtggttgttttattttgtagtttttttttatgtatttgttgtgtattggttattttgtgttgtatttatgttattttttttttaaattgaggtggtatttatatatagtgttagtgtatatagtaagtgtataggaagatgagttttggtttttaattgttttgtgatgtttattaagttatagattttttttattgttttagaaatgttttattatgtttttttttagttgatttttgattttatttttattttgatttttataattattttgtttgttggagaattttatatagaatggaattaggttgggtgttgtggtttatgtttgtattttgggaggttgaggtgggtggattatttgaggataggagttttagattagtgtggttaatgtggtgaatttttgtttttattaaaaaatataaaaattagttgggtgtggtgggtgtttgtaattttagttatttgggagggtgaggtaggagaattgtttgaatttgggaggtagaggttgtagtgagttaagattgtgttattatattttagtttgggtgataagaatgaaattttgttttaaaaaaaaggggggaattatatattatgtgtttatttttgttgggtttttgttttttaatgtattgtttgatatttgtttatgttgtatatattagtattttgtttttttttatttagtatagtttattgattgtatatttgtttttttgatggttttttgagttgttttttatttgtggttatgaaataaagttgttataaatatttttgtataattttttttgtgatta

SEQ ID NO: 519 - DNA, 3001 bp, homo sapiens
tgattataaaaagaattgtataagaatgtttatagtagttttattttataatcgtaaatgggaaataatttaaaaggttattaaaaggacggatatataatcgatggattatattaaatgaaaaggagtaaaatattgatatatataatatgaacgaatgttagatagtatattgaaggatagaagttcgataaaaatgagtatataatgtatgattttttttttttttttgagacggagtttcgtttttgtcgtttaggttggagtgtagtggtacgattttggtttattgtaatttttgtttttcgggtttaagcgatttttttgttttattttttcgaatagttgggattataggtatttattacgtttagttaatttttgtattttttagtagagacggggatttattacgttggttacgttggtttggaatttttatttttaagtaattcgttcgtttcggttttttaaagtgtaggcgtgagttatagcgtttagtttgattttattttatatgaagttttttaataggtaaaatggttatggagattaaaataaaggtggggtcgggaatcgattgggaagagacgtgatgaaacgtttttgggacgatgaaaagggtttgtgatttggtaggtattacggagcggttaggggttaaaatttatttttttgtgtatttgttgtgtgtattggcgttgtgtgtaaatgttatttcgatttaggaaaaagatgacgtaagtacggtataaagtggtcggtacgcggtaggtgtatgggaagaaattgcggaatgaaataatcgcgagttaagagatggggtagcgggagaaatgaattcgagtttcgttttttattaggaagaatcggttcgggtcggagggttgtacggaggattatacggacgtttgcgggttcgtttttttcgttttacgacgtttagtttgcgtttggaattggaatggtttagtttaaagttagataataggtagattgttttttcgataaattattaaacgatttattattgtatttttttaaaatttgatttttagacgtatttattttttttttttttttttcgggaagatgagatatatttatttttgaaaatattttcgggtttgttttttgtatatttttttttttttttgttttacgttatggtagcgttcgtttaggttgtaggcgattcgcggggtggggtatattatttaaagaaggggagggattgaggtttgtattaaaataaatatttttgtttttgtaaaggttataattaagtaatttagaaaaagaaatgtaggcggagaatagtagtttttttttgttaagtaagaggaatcggtttaaaggatatttttttttttttttttttttttttatcgggtgaatagtgagttgtttcggtaaaaagaaatcggaaatgttgttgtaagaggtagaaatgtaaatgtggagttaaataataatagggttgtcgggttttttagattgcgacggtttttttcggtttggcgggtaaatttttggtttagtattttttatttttacgattgatagtttttaattggattttttttatttagcggagtcgggggttgtttggaaagatcgttttaggaaggataaaggttcggaagttgtgggattttagtagtttgggtttttcggattatttttaaatgattatttcggaatggagttttagtttttattaggatgttatgggttttaaaatatatagttatgagtttttaatgtttcgagatttaaaagttttagattttaatgttttgtgtattttttattttagggattttttacgtttagtatcgggtggatgtgtaaagaagtacgttttaggtcggtttaaggttttttaaagttttatttttttgtttaggcgtttaattttgagttcggatggttttaatatttttattatttatatttaggttttttaataatgtaatttttatgatgatttttttagttaagtttttattttatttatttttaaattcgttaagtttttattgttttatttttagttttagcgattttttcgagttgaaaatatacggagtcgagagttcgtgatttagagaggatttattaagtttagttaggagtttatttaatttagggaagcgtgttatcgtcgtggaaagtacgtttttagttcgaacgtaaagtgttttcggagtttagtagttatttgttttttggacggtggttttagatttttgagaagtttaaaatttttagcgttagttttgagtatatgggaggggaaaattttaattttattaatttttgcgaggtttttggtataaagttggatagtcgttatgataagtaagggtaagtaattcgtttgtcggaggaagtaaaggaaatggagttggggaggagggtgtagagttaggattttcgtcgatttggtgtcgtagatattaatattttggggtggaaaattttgtaagttagagttgtgagggtagaattggtggaaattattttggaggaattttgtattgtgttaaatatgaagggtggaaggaagaaagtttttgcgtttgtttttagttggattttttttttttattagttaaaatgttattttttaggaaggtttttcgtaatattatattttaacgtttttttttagatattttatattatattattttatttaattttttttataatttttattattttgataagatttatttgtttattgtttttagtatatggaaacgtaagttttatgaggatatagaatttttttattattttatttattgttgtatttttgagtgtttatattagtgttgggtagtaagtaagagttcgataataaatattttttgaatgagggagataggtttgaagtttggagaatgagatgtagaagaggtgtaagatttgttgcgttttttgtaggcggcgggggggcggtgtaggtgttttaagaattatcgcgggattt

SEQ ID NO: 520 - DNA, 3001 bp, homo sapiens
tgattataaaaagaattgtataagaatgtttatagtagttttattttataattgtaaatgggaaataatttaaaaggttattaaaaggatggatatataattgatggattatattaaatgaaaaggagtaaaatattgatatatataatatgaatgaatgttagatagtatattgaaggatagaagtttgataaaaatgagtatataatgtatgattttttttttttttttgagatggagttttgtttttgttgtttaggttggagtgtagtggtatgattttggtttattgtaatttttgttttttgggtttaagtgatttttttgttttatttttttgaatagttgggattataggtatttattatgtttagttaatttttgtattttttagtagagatggggatttattatgttggttatgttggtttggaatttttatttttaagtaatttgtttgttttggttttttaaagtgtaggtgtgagttatagtgtttagtttgattttattttatatgaagttttttaataggtaaaatggttatggagattaaaataaaggtggggttgggaattgattgggaagagatgtgatgaaatgtttttgggatgatgaaaagggtttgtgatttggtaggtattatggagtggttaggggttaaaatttatttttttgtgtatttgttgtgtgtattggtgttgtgtgtaaatgttattttgatttaggaaaaagatgatgtaagtatggtataaagtggttggtatgtggtaggtgtatgggaagaaattgtggaatgaaataattgtgagttaagagatggggtagtgggagaaatgaatttgagttttgttttttattaggaagaattggtttgggttggagggttgtatggaggattatatggatgtttgtgggtttgttttttttgttttatgatgtttagtttgtgtttggaattggaatggtttagtttaaagttagataataggtagattgtttttttgataaattattaaatgatttattattgtatttttttaaaatttgatttttagatgtatttatttttttttttttttttttgggaagatgagatatatttatttttgaaaatatttttgggtttgttttttgtatatttttttttttttttgttttatgttatggtagtgtttgtttaggttgtaggtgatttgtggggtggggtatattatttaaagaaggggagggattgaggtttgtattaaaataaatatttttgtttttgtaaaggttataattaagtaatttagaaaaagaaatgtaggtggagaatagtagtttttttttgttaagtaagaggaattggtttaaaggatatttttttttttttttttttttttttattgggtgaatagtgagttgttttggtaaaaagaaattggaaatgttgttgtaagaggtagaaatgtaaatgtggagttaaataataatagggttgttgggttttttagattgtgatggttttttttggtttggtgggtaaatttttggtttagtattttttatttttatgattgatagtttttaattggattttttttatttagtggagttgggggttgtttggaaagattgttttaggaaggataaaggtttggaagttgtgggattttagtagtttgggttttttggattatttttaaatgattattttggaatggagttttagtttttattaggatgttatgggttttaaaatatatagttatgagtttttaatgttttgagatttaaaagttttagattttaatgttttgtgtattttttattttagggattttttatgtttagtattgggtggatgtgtaaagaagtatgttttaggttggtttaaggttttttaaagttttatttttttgtttaggtgtttaattttgagtttggatggttttaatatttttattatttatatttaggttttttaataatgtaatttttatgatgatttttttagttaagtttttattttatttatttttaaatttgttaagtttttattgttttatttttagttttagtgatttttttgagttgaaaatatatggagttgagagtttgtgatttagagaggatttattaagtttagttaggagtttatttaatttagggaagtgtgttattgttgtggaaagtatgtttttagtttgaatgtaaagtgtttttggagtttagtagttatttgttttttggatggtggttttagatttttgagaagtttaaaatttttagtgttagttttgagtatatgggaggggaaaattttaattttattaatttttgtgaggtttttggtataaagttggatagttgttatgataagtaagggtaagtaatttgtttgttggaggaagtaaaggaaatggagttggggaggagggtgtagagttaggatttttgttgatttggtgttgtagatattaatattttggggtggaaaattttgtaagttagagttgtgagggtagaattggtggaaattattttggaggaattttgtattgtgttaaatatgaagggtggaaggaagaaagtttttgtgtttgtttttagttggattttttttttttattagttaaaatgttattttttaggaaggttttttgtaatattatattttaatgtttttttttagatattttatattatattattttatttaattttttttataatttttattattttgataagatttatttgtttattgtttttagtatatggaaatgtaagttttatgaggatatagaatttttttattattttatttattgttgtatttttgagtgtttatattagtgttgggtagtaagtaagagtttgataataaatattttttgaatgagggagataggtttgaagtttggagaatgagatgtagaagaggtgtaagatttgttgtgttttttgtaggtggtgggggggtggtgtaggtgttttaagaattattgtgggattt

SEQ ID NO: 521 - DNA, 50 bp, homo sapiens
actgttacggctgtgattttacaactgctcctacatgctgggagcagtcg

SEQ ID NO: 522 - DNA, 50 bp, homo sapiens
attgttacggttgtgattttataattgtttttatatgttgggagtagtcg

SEQ ID NO: 523 - DNA, 50 bp, homo sapiens
attgttatggttgtgattttataattgtttttatatgttgggagtagttg

SEQ ID NO: 524 - DNA, 50 bp, homo sapiens
cgattgtttttagtatgtaggagtagttgtaaaattatagtcgtaatagt

SEQ ID NO: 525 - DNA, 50 bp, homo sapiens
tgattgtttttagtatgtaggagtagttgtaaaattatagttgtaatagt

SEQ ID NO: 526 - DNA, 3001 bp, homo sapiens
tacagtctcctcagatatcgtttgtggtatgtttaggctttaattttgtctttctgtgcatttgcctaagtatatttctggtcttgatattgaaagacagattcaagctgtaatacatcacagctgttgggcaggaactcacgggaagccatgagcaaggtagaaggggctgctattagaaacaacttgaggcacccatagatgcaaccaaaccttaatccaaggtgtattcatttcatattgcttctgtaacaaattaccacaaatttaatagcttaaaatgcacaaatttattttcttatagtgctggagtttagaggtaataacctcaaggtgttgtcattcctttggaggctctaggattgaatctatttccttacctttcaagcttctagaggctgcctttattcctacgatcctggctccttcctccatcttcaaagccagcaacatagcgatttccctttcctccctcccacacctattctccaccattccttccctctctctgtgctttcgtcctcttatcttctctgactgaccctcctgcctccttcttataagaaatttgtaattccatagggcccacctgtataatccagaatcatcttctcatctccaaatctttaacttaatcatatctgcgaagtccctttggccgcataactaagacaggtacatctttgagggccatcaggctactaccacacaaagcaaattaagtagaaaataacgtttgcctcttttataccttgagtccaccagctgcatgttgccctttgcaagtttgttttctacttcaaggccatcttagttgtccattttaactagcctttcctcacaaaatggtggtatgtggctccccccactgatatttctctgaggccttgtagctctctaagacagcaccagtttaactcacaagtcaacaaactggaacacttcaaccagagacattgacatccccctctaatgaactcagctgattgctaaagacagatgcttcgttagagccaaacattcctatcttacataactaaatatgataataaattaagttcttggggctggaaatagttataatttcctctttcttgcagtgaaaaggcatggaacatttagcaaactgatcctggcttaatttctaccgatactatgcagcacaaactcttatttgatgcagattataaatcgaaaattagcaatgaatactatgcatcgctttagtggtaagaggctgctgagtagctttttttccccagtaaccgtagaggcaagaattgatatttttatgtcacttttactaagaaggggggaaacattttgctattaatcttaaagagaagtcttttgctgctagttacgtggagtaacagggaatagatttaccttcctgcctcaaaaaagtgaagaccagaaaaacatttgttttcagacactggagagcaggcactgttacggctgtgattttacaactgctcctacatgctgggagcagtcgctagatgcatctcaaggtgggtcgtccgcgcttccagactcagcacaatcgacatttatttacgtaggtaaaattactgttgctatgggtaaattcacagaaataaagcccagagaatccggttggctggcagggagcggcggaaccaatcccgggctcagcaagttctcgcgataccgtgagatctccagtcctgacgacaccgccgctgaaatgttagtgagactgtagggtgggcggtgcgagcggcggttagctcccagttcggcctctgaggaaaacgggcgttcgcctgcggttggtccgactgttagcaacatgagcggcctggatggggtcaagaggaccactcccctccaaacccacagcatcattatttctgaccaagtcccgagcgaccaggacgcacaccagtacctgaggctccgcgaccaaagcgaggcgacacaggtgatggcggagccgggtgagggaggctcggagaccgtcgcgctcccgcctccaccgccttcagaggaggggggcgtaccccaggatgccgcgggccgtggcggtactccccagatccgagttgttgggggtcgcggtcatgtggcgatcaaagccgggcaggaagagggccagcctcccgccgaaggcctggcagccgcttctgtggtgatggcagccgaccgcagcctgaaaaagggcgttcagggtggagagaaggccctagaaatctgtggcgcccagagatccgcgtctgagctgacggcgggggcggaggctgaggcggaggaggtgaagacaggaaagtgcgccaccgtctcagcagccgtggctgagagggagagcgctgaggtggtgaaggaaggcctggcggagaaggaggtaatggaggagcagatggaggtagaggagcagccgccagaaggtgaagaaatagaagtggcggaggaggatagattggaggaggaggcgagggaggaagaagggccctggcctttgcatgaggctctccgcatggaccctctggaggccatccagctggaactggacactgtgaatgctcaggccgacagggccttccaacagctggagcacaagtttgggcggatgcgtcgacactacctggagcggaggaactacatcattcagaatatcccgggcttctggatgactgcttttcgaaaccacccccagttgtccgccatgattaggggccaagatgcagagatgttaaggtacataaccaatttagaggtgaaggaactcagacaccctagaaccggttgcaagttcaagttcttctttagaagaaacccctacttcagaaacaagctgattgtcaaggaatatgaggtaagatcctccggccgagtggtgtctctttctactccaattatatggcgcagggggcatgaaccccagtccttcattcgcagaaaccaagacctcatctgcagcttcttcacttggttttcagaccacagccttccagagtccgacaaaattgctgag

SEQ ID NO: 527 - DNA, 3001 bp, homo sapiens
tatagtttttttagatatcgtttgtggtatgtttaggttttaattttgtttttttgtgtatttgtttaagtatatttttggttttgatattgaaagatagatttaagttgtaatatattatagttgttgggtaggaatttacgggaagttatgagtaaggtagaaggggttgttattagaaataatttgaggtatttatagatgtaattaaattttaatttaaggtgtatttattttatattgtttttgtaataaattattataaatttaatagtttaaaatgtataaatttatttttttatagtgttggagtttagaggtaataattttaaggtgttgttatttttttggaggttttaggattgaatttatttttttattttttaagtttttagaggttgtttttatttttacgattttggtttttttttttatttttaaagttagtaatatagcgatttttttttttttttttttatatttattttttattattttttttttttttttgtgttttcgtttttttattttttttgattgatttttttgttttttttttataagaaatttgtaattttatagggtttatttgtataatttagaattatttttttatttttaaatttttaatttaattatatttgcgaagtttttttggtcgtataattaagataggtatatttttgagggttattaggttattattatataaagtaaattaagtagaaaataacgtttgttttttttatattttgagtttattagttgtatgttgttttttgtaagtttgttttttattttaaggttattttagttgtttattttaattagtttttttttataaaatggtggtatgtggttttttttattgatatttttttgaggttttgtagttttttaagatagtattagtttaatttataagttaataaattggaatattttaattagagatattgatatttttttttaatgaatttagttgattgttaaagatagatgtttcgttagagttaaatatttttattttatataattaaatatgataataaattaagtttttggggttggaaatagttataatttttttttttttgtagtgaaaaggtatggaatatttagtaaattgattttggtttaatttttatcgatattatgtagtataaatttttatttgatgtagattataaatcgaaaattagtaatgaatattatgtatcgttttagtggtaagaggttgttgagtagttttttttttttagtaatcgtagaggtaagaattgatatttttatgttatttttattaagaaggggggaaatattttgttattaattttaaagagaagttttttgttgttagttacgtggagtaatagggaatagatttatttttttgttttaaaaaagtgaagattagaaaaatatttgtttttagatattggagagtaggtattgttacggttgtgattttataattgtttttatatgttgggagtagtcgttagatgtattttaaggtgggtcgttcgcgtttttagatttagtataatcgatatttatttacgtaggtaaaattattgttgttatgggtaaatttatagaaataaagtttagagaattcggttggttggtagggagcggcggaattaatttcgggtttagtaagttttcgcgatatcgtgagatttttagttttgacgatatcgtcgttgaaatgttagtgagattgtagggtgggcggtgcgagcggcggttagtttttagttcggtttttgaggaaaacgggcgttcgtttgcggttggttcgattgttagtaatatgagcggtttggatggggttaagaggattatttttttttaaatttatagtattattatttttgattaagtttcgagcgattaggacgtatattagtatttgaggtttcgcgattaaagcgaggcgatataggtgatggcggagtcgggtgagggaggttcggagatcgtcgcgttttcgtttttatcgtttttagaggaggggggcgtattttaggatgtcgcgggtcgtggcggtattttttagattcgagttgttgggggtcgcggttatgtggcgattaaagtcgggtaggaagagggttagtttttcgtcgaaggtttggtagtcgtttttgtggtgatggtagtcgatcgtagtttgaaaaagggcgtttagggtggagagaaggttttagaaatttgtggcgtttagagattcgcgtttgagttgacggcgggggcggaggttgaggcggaggaggtgaagataggaaagtgcgttatcgttttagtagtcgtggttgagagggagagcgttgaggtggtgaaggaaggtttggcggagaaggaggtaatggaggagtagatggaggtagaggagtagtcgttagaaggtgaagaaatagaagtggcggaggaggatagattggaggaggaggcgagggaggaagaagggttttggtttttgtatgaggtttttcgtatggattttttggaggttatttagttggaattggatattgtgaatgtttaggtcgatagggttttttaatagttggagtataagtttgggcggatgcgtcgatattatttggagcggaggaattatattatttagaatatttcgggtttttggatgattgtttttcgaaattatttttagttgttcgttatgattaggggttaagatgtagagatgttaaggtatataattaatttagaggtgaaggaatttagatattttagaatcggttgtaagtttaagtttttttttagaagaaatttttattttagaaataagttgattgttaaggaatatgaggtaagatttttcggtcgagtggtgtttttttttattttaattatatggcgtagggggtatgaattttagttttttattcgtagaaattaagattttatttgtagtttttttatttggtttttagattatagttttttagagttcgataaaattgttgag

SEQ ID NO: 528 - DNA, 3001 bp, homo sapiens
tatagtttttttagatattgtttgtggtatgtttaggttttaattttgtttttttgtgtatttgtttaagtatatttttggttttgatattgaaagatagatttaagttgtaatatattatagttgttgggtaggaatttatgggaagttatgagtaaggtagaaggggttgttattagaaataatttgaggtatttatagatgtaattaaattttaatttaaggtgtatttattttatattgtttttgtaataaattattataaatttaatagtttaaaatgtataaatttatttttttatagtgttggagtttagaggtaataattttaaggtgttgttatttttttggaggttttaggattgaatttatttttttattttttaagtttttagaggttgtttttatttttatgattttggtttttttttttatttttaaagttagtaatatagtgatttttttttttttttttttatatttattttttattattttttttttttttttgtgtttttgtttttttattttttttgattgatttttttgttttttttttataagaaatttgtaattttatagggtttatttgtataatttagaattatttttttatttttaaatttttaatttaattatatttgtgaagtttttttggttgtataattaagataggtatatttttgagggttattaggttattattatataaagtaaattaagtagaaaataatgtttgttttttttatattttgagtttattagttgtatgttgttttttgtaagtttgttttttattttaaggttattttagttgtttattttaattagtttttttttataaaatggtggtatgtggttttttttattgatatttttttgaggttttgtagttttttaagatagtattagtttaatttataagttaataaattggaatattttaattagagatattgatatttttttttaatgaatttagttgattgttaaagatagatgttttgttagagttaaatatttttattttatataattaaatatgataataaattaagtttttggggttggaaatagttataatttttttttttttgtagtgaaaaggtatggaatatttagtaaattgattttggtttaatttttattgatattatgtagtataaatttttatttgatgtagattataaattgaaaattagtaatgaatattatgtattgttttagtggtaagaggttgttgagtagttttttttttttagtaattgtagaggtaagaattgatatttttatgttatttttattaagaaggggggaaatattttgttattaattttaaagagaagttttttgttgttagttatgtggagtaatagggaatagatttatttttttgttttaaaaaagtgaagattagaaaaatatttgtttttagatattggagagtaggtattgttatggttgtgattttataattgtttttatatgttgggagtagttgttagatgtattttaaggtgggttgtttgtgtttttagatttagtataattgatatttatttatgtaggtaaaattattgttgttatgggtaaatttatagaaataaagtttagagaatttggttggttggtagggagtggtggaattaattttgggtttagtaagtttttgtgatattgtgagatttttagttttgatgatattgttgttgaaatgttagtgagattgtagggtgggtggtgtgagtggtggttagtttttagtttggtttttgaggaaaatgggtgtttgtttgtggttggtttgattgttagtaatatgagtggtttggatggggttaagaggattatttttttttaaatttatagtattattatttttgattaagttttgagtgattaggatgtatattagtatttgaggttttgtgattaaagtgaggtgatataggtgatggtggagttgggtgagggaggtttggagattgttgtgtttttgtttttattgtttttagaggaggggggtgtattttaggatgttgtgggttgtggtggtattttttagatttgagttgttgggggttgtggttatgtggtgattaaagttgggtaggaagagggttagttttttgttgaaggtttggtagttgtttttgtggtgatggtagttgattgtagtttgaaaaagggtgtttagggtggagagaaggttttagaaatttgtggtgtttagagatttgtgtttgagttgatggtgggggtggaggttgaggtggaggaggtgaagataggaaagtgtgttattgttttagtagttgtggttgagagggagagtgttgaggtggtgaaggaaggtttggtggagaaggaggtaatggaggagtagatggaggtagaggagtagttgttagaaggtgaagaaatagaagtggtggaggaggatagattggaggaggaggtgagggaggaagaagggttttggtttttgtatgaggttttttgtatggattttttggaggttatttagttggaattggatattgtgaatgtttaggttgatagggttttttaatagttggagtataagtttgggtggatgtgttgatattatttggagtggaggaattatattatttagaatattttgggtttttggatgattgttttttgaaattatttttagttgtttgttatgattaggggttaagatgtagagatgttaaggtatataattaatttagaggtgaaggaatttagatattttagaattggttgtaagtttaagtttttttttagaagaaatttttattttagaaataagttgattgttaaggaatatgaggtaagattttttggttgagtggtgtttttttttattttaattatatggtgtagggggtatgaattttagttttttatttgtagaaattaagattttatttgtagtttttttatttggtttttagattatagttttttagagtttgataaaattgttgag

SEQ ID NO: 529 - DNA, 3001 bp, homo sapiens
tttagtaattttgtcggattttggaaggttgtggtttgaaaattaagtgaagaagttgtagatgaggttttggtttttgcgaatgaaggattggggtttatgttttttgcgttatataattggagtagaaagagatattattcggtcggaggattttattttatattttttgataattagtttgtttttgaagtaggggttttttttaaagaagaatttgaatttgtaatcggttttagggtgtttgagtttttttatttttaaattggttatgtattttaatatttttgtattttggtttttaattatggcggataattgggggtggtttcgaaaagtagttatttagaagttcgggatattttgaatgatgtagttttttcgttttaggtagtgtcgacgtattcgtttaaatttgtgttttagttgttggaaggttttgtcggtttgagtatttatagtgtttagttttagttggatggtttttagagggtttatgcggagagttttatgtaaaggttagggtttttttttttttttcgtttttttttttaatttattttttttcgttatttttatttttttattttttggcggttgtttttttatttttatttgtttttttattattttttttttcgttaggtttttttttattattttagcgtttttttttttagttacggttgttgagacggtggcgtatttttttgtttttatttttttcgttttagttttcgttttcgtcgttagtttagacgcggatttttgggcgttatagatttttagggttttttttttattttgaacgtttttttttaggttgcggtcggttgttattattatagaagcggttgttaggttttcggcgggaggttggttttttttttgttcggttttgatcgttatatgatcgcgatttttaataattcggatttggggagtatcgttacggttcgcggtattttggggtacgttttttttttttgaaggcggtggaggcgggagcgcgacggttttcgagttttttttattcggtttcgttattatttgtgtcgtttcgttttggtcgcggagttttaggtattggtgtgcgttttggtcgttcgggatttggttagaaataatgatgttgtgggtttggaggggagtggtttttttgattttatttaggtcgtttatgttgttaatagtcggattaatcgtaggcgaacgttcgttttttttagaggtcgaattgggagttaatcgtcgttcgtatcgtttattttatagttttattaatattttagcggcggtgtcgttaggattggagattttacggtatcgcgagaatttgttgagttcgggattggtttcgtcgttttttgttagttaatcggattttttgggttttatttttgtgaatttatttatagtaatagtaattttatttacgtaaataaatgtcgattgtgttgagtttggaagcgcggacgatttattttgagatgtatttagcgattgtttttagtatgtaggagtagttgtaaaattatagtcgtaatagtgtttgttttttagtgtttgaaaataaatgtttttttggtttttatttttttgaggtaggaaggtaaatttattttttgttattttacgtaattagtagtaaaagatttttttttaagattaatagtaaaatgttttttttttttttagtaaaagtgatataaaaatattaatttttgtttttacggttattggggaaaaaaagttatttagtagttttttattattaaagcgatgtatagtatttattgttaattttcgatttataatttgtattaaataagagtttgtgttgtatagtatcggtagaaattaagttaggattagtttgttaaatgttttatgtttttttattgtaagaaagaggaaattataattatttttagttttaagaatttaatttattattatatttagttatgtaagataggaatgtttggttttaacgaagtatttgtttttagtaattagttgagtttattagagggggatgttaatgtttttggttgaagtgttttagtttgttgatttgtgagttaaattggtgttgttttagagagttataaggttttagagaaatattagtggggggagttatatattattattttgtgaggaaaggttagttaaaatggataattaagatggttttgaagtagaaaataaatttgtaaagggtaatatgtagttggtggatttaaggtataaaagaggtaaacgttattttttatttaatttgttttgtgtggtagtagtttgatggtttttaaagatgtatttgttttagttatgcggttaaagggatttcgtagatatgattaagttaaagatttggagatgagaagatgattttggattatataggtgggttttatggaattataaattttttataagaaggaggtaggagggttagttagagaagataagaggacgaaagtatagagagagggaaggaatggtggagaataggtgtgggagggaggaaagggaaatcgttatgttgttggttttgaagatggaggaaggagttaggatcgtaggaataaaggtagtttttagaagtttgaaaggtaaggaaatagatttaattttagagtttttaaaggaatgataatattttgaggttattatttttaaattttagtattataagaaaataaatttgtgtattttaagttattaaatttgtggtaatttgttatagaagtaatatgaaatgaatatattttggattaaggtttggttgtatttatgggtgttttaagttgtttttaatagtagttttttttattttgtttatggtttttcgtgagtttttgtttaatagttgtgatgtattatagtttgaatttgttttttaatattaagattagaaatatatttaggtaaatgtatagaaagataaaattaaagtttaaatatattataaacgatatttgaggagattgta

SEQ ID NO: 530 - DNA, 3001 bp, homo sapiens
tttagtaattttgttggattttggaaggttgtggtttgaaaattaagtgaagaagttgtagatgaggttttggtttttgtgaatgaaggattggggtttatgttttttgtgttatataattggagtagaaagagatattatttggttggaggattttattttatattttttgataattagtttgtttttgaagtaggggttttttttaaagaagaatttgaatttgtaattggttttagggtgtttgagtttttttatttttaaattggttatgtattttaatatttttgtattttggtttttaattatggtggataattgggggtggttttgaaaagtagttatttagaagtttgggatattttgaatgatgtagtttttttgttttaggtagtgttgatgtatttgtttaaatttgtgttttagttgttggaaggttttgttggtttgagtatttatagtgtttagttttagttggatggtttttagagggtttatgtggagagttttatgtaaaggttagggttttttttttttttttgtttttttttttaatttatttttttttgttatttttatttttttattttttggtggttgtttttttatttttatttgtttttttattatttttttttttgttaggtttttttttattattttagtgtttttttttttagttatggttgttgagatggtggtgtatttttttgtttttattttttttgttttagtttttgtttttgttgttagtttagatgtggatttttgggtgttatagatttttagggttttttttttattttgaatgtttttttttaggttgtggttggttgttattattatagaagtggttgttaggtttttggtgggaggttggttttttttttgtttggttttgattgttatatgattgtgatttttaataatttggatttggggagtattgttatggtttgtggtattttggggtatgttttttttttttgaaggtggtggaggtgggagtgtgatggtttttgagttttttttatttggttttgttattatttgtgttgttttgttttggttgtggagttttaggtattggtgtgtgttttggttgtttgggatttggttagaaataatgatgttgtgggtttggaggggagtggtttttttgattttatttaggttgtttatgttgttaatagttggattaattgtaggtgaatgtttgttttttttagaggttgaattgggagttaattgttgtttgtattgtttattttatagttttattaatattttagtggtggtgttgttaggattggagattttatggtattgtgagaatttgttgagtttgggattggttttgttgttttttgttagttaattggattttttgggttttatttttgtgaatttatttatagtaatagtaattttatttatgtaaataaatgttgattgtgttgagtttggaagtgtggatgatttattttgagatgtatttagtgattgtttttagtatgtaggagtagttgtaaaattatagttgtaatagtgtttgttttttagtgtttgaaaataaatgtttttttggtttttatttttttgaggtaggaaggtaaatttattttttgttattttatgtaattagtagtaaaagatttttttttaagattaatagtaaaatgttttttttttttttagtaaaagtgatataaaaatattaatttttgtttttatggttattggggaaaaaaagttatttagtagttttttattattaaagtgatgtatagtatttattgttaatttttgatttataatttgtattaaataagagtttgtgttgtatagtattggtagaaattaagttaggattagtttgttaaatgttttatgtttttttattgtaagaaagaggaaattataattatttttagttttaagaatttaatttattattatatttagttatgtaagataggaatgtttggttttaatgaagtatttgtttttagtaattagttgagtttattagagggggatgttaatgtttttggttgaagtgttttagtttgttgatttgtgagttaaattggtgttgttttagagagttataaggttttagagaaatattagtggggggagttatatattattattttgtgaggaaaggttagttaaaatggataattaagatggttttgaagtagaaaataaatttgtaaagggtaatatgtagttggtggatttaaggtataaaagaggtaaatgttattttttatttaatttgttttgtgtggtagtagtttgatggtttttaaagatgtatttgttttagttatgtggttaaagggattttgtagatatgattaagttaaagatttggagatgagaagatgattttggattatataggtgggttttatggaattataaattttttataagaaggaggtaggagggttagttagagaagataagaggatgaaagtatagagagagggaaggaatggtggagaataggtgtgggagggaggaaagggaaattgttatgttgttggttttgaagatggaggaaggagttaggattgtaggaataaaggtagtttttagaagtttgaaaggtaaggaaatagatttaattttagagtttttaaaggaatgataatattttgaggttattatttttaaattttagtattataagaaaataaatttgtgtattttaagttattaaatttgtggtaatttgttatagaagtaatatgaaatgaatatattttggattaaggtttggttgtatttatgggtgttttaagttgtttttaatagtagttttttttattttgtttatggttttttgtgagtttttgtttaatagttgtgatgtattatagtttgaatttgttttttaatattaagattagaaatatatttaggtaaatgtatagaaagataaaattaaagtttaaatatattataaatgatatttgaggagattgta

SEQ ID NO: 531 - DNA, 50 bp, homo sapiens
cgcccgggctctgtcctgctggtaaacaaccctggtctcccgggcaacgc

SEQ ID NO: 532 - DNA, 50 bp, homo sapiens
cgttcgggttttgttttgttggtaaataattttggtttttcgggtaacgt

SEQ ID NO: 533 - DNA, 50 bp, homo sapiens
tgtttgggttttgttttgttggtaaataattttggttttttgggtaatgt

SEQ ID NO: 534 - DNA, 50 bp, homo sapiens
gcgttgttcgggagattagggttgtttattagtaggatagagttcgggcg

SEQ ID NO: 535 - DNA, 50 bp, homo sapiens
gtgttgtttgggagattagggttgtttattagtaggatagagtttgggtg

SEQ ID NO: 536 - DNA, 3001 bp, homo sapiens
ggtaaaaccattatatccaacctgctttcataacccactgcctcctcccgagcacagggaccatctgttacacggagggaacaccagctctccccagcacccatcacacagggatgggcggtgggggaaacaggtgtttggggatctgggccaactgtgcctttatattcacacctcaggtcctgaactctgcccaccaccctcagtccaggattgaggcagcagccatgattctccctgctcagttcacttcaccacctctaggcctggcagccactcaaccacaaaccgatttgacaagatctaggcgtaggcatctatcaagctgccaagctgaataggcgagtggcctgtttacttaaacacaatagctgcaccccagcggcctgctaggagtcaggaagcaaacactgccaactgtttccaagaagttgccagaagggcaggtgcccattccttaagattcaccaccaaatcaactggaaagaaggaaatgtggataggagaagctaaagcagggctcctgctttctaagggtgcccaccacccaccacagggtcagaccaccctatttcactcacaacccaaatctaagcctacagtatatgcagtaaaatataaccacctacataccatctgctggtatataccaagatacatacatttgaattggtcttttaaaactgtatcagttaatcctatccgttgccatcccgccccccccaacccacacccccaccaggctttcaggataaaaatgctctgaagaaccaacaggagatggtggttggcctgagaatgaaaaaactctggtaccattcccagttctaccccaaactagggattagaatacactgtcctatgcagagtgccacactgaaccacaagccaccaagtgatcaaatgtttggatagagaactggggatgattccagcgtcagaagggcagggaggtggtggggataactcaattaagtccaagttccagcgccctagaaggcaacaggcttaagaggcagaggagggatctgggggaggggcgagaaagagcgtttagaaagcgagaattgacttcagagaaagagcacaggactgggggaggggccctctggttctcgtctctgccctgccggagactgggacatccttttctctccctgggtctgtgtccccgtcgctacatcccagcctggagggcatggcccagcggttgcataggtccctcggtttctgcagagcccgggagtcaccctattttggtaaaggtgagctctggccaggcttgctttgcctcgggagcagacttttctccaggctcctcgcctgtctcccggggtttgcgtcccccgggctgggtctggggaggccctcccgggtgatgtgctggggtctcggggactggcctcccccggccccttccaggcctggcggaggccaagggcaggccgcgggatcgggcagccgctctcacctagccgttccgctccatccgccgcctgcgcccgggctctgtcctgctggtaaacaaccctggtctcccgggcaacgccgcagggtggggggccacgtgcttccggcgtgaccggaaccggcctgggtcgggtggggtcgggtggggtcgggtgggggccgctgggccaggagggcggaggccgtgaactccaggtcggtggattgcgagcctggagtggattgcctggcctggaggcgacagggacccgcggcctccttctctcctcctcttcctagcgtcaccgcctctgtttctctctgggggagagtgtctgggagagggagagccctggccggggcatggaggagcggggagcagcaccactagtctcaaaatccgtttctcaccttgggtcaggccctgaccctctcagtgtccctggttttaaaatgaggctgtgggactgatggattctcggaaccctaaactctgagtggatgcttctagggtatctgagttgcggggagcagggcccccatcctcagtacagccctttcagcgccagttccctgacctcttttcacatcagcctcccactccggggccacactgggaaccttatcaacagcatctgcacctcctttgatgtccccagccacaatctcttccacttccagccacttgagtcacttccgctgtatctgtttttcaccatctttgggtttcctgtccattgctgtctccgctttccccctcgatatcaatctgcttcttccctatcctggcccattacctcggcattctcaaaaggatcctccctgcccgagtcctactctccttccatctgatgaaacctgaagccaaaccagtccacctacacacgggtattgaagaagtcttggccagccacacaccttggtgtaacagaaacacgaggtctctaacctcagttagactctcagccctgcacttccatccccaaccgaccactgggttctctctccctcctttcttctttttcttccttttttaaggggagacagggtctcgccccttcacccaggctggagtgcagtggtgcaatcacagctcactgcagcctggacctccccagctcagcctcccttgtagctgggactacaggcgtgcaccaccatgcttggctaatttttattattttttgtagaatggggttctgccatgttgctgagggtggtcttgaagtcttgggctcaagtgatcctcccgcctcagcctcccaaagtgctgagattacagacatgagccacctcgcccagcctctcctttcttctcaatggctatttcaaaacgttgttttgcttgcgaaacctcccacctctccctctcccacctccctccctcctccctcttagaagatacctttactgccctcttcagagagaaaatagaagccatcatatggaaacttcctcagccttctgccatcagacctgcaaacttgcctgcctacacttccttgctttcctccctccctccagttctaatgtcttctgattctctccaagg

SEQ ID NO: 537 - DNA, 3001 bp, homo sapiens
ggtaaaattattatatttaatttgtttttataatttattgttttttttcgagtatagggattatttgttatacggagggaatattagttttttttagtatttattatatagggatgggcggtgggggaaataggtgtttggggatttgggttaattgtgtttttatatttatattttaggttttgaattttgtttattatttttagtttaggattgaggtagtagttatgattttttttgtttagtttattttattatttttaggtttggtagttatttaattataaatcgatttgataagatttaggcgtaggtatttattaagttgttaagttgaataggcgagtggtttgtttatttaaatataatagttgtattttagcggtttgttaggagttaggaagtaaatattgttaattgtttttaagaagttgttagaagggtaggtgtttattttttaagatttattattaaattaattggaaagaaggaaatgtggataggagaagttaaagtagggtttttgttttttaagggtgtttattatttattatagggttagattattttattttatttataatttaaatttaagtttatagtatatgtagtaaaatataattatttatatattatttgttggtatatattaagatatatatatttgaattggttttttaaaattgtattagttaattttattcgttgttatttcgttttttttaatttatatttttattaggtttttaggataaaaatgttttgaagaattaataggagatggtggttggtttgagaatgaaaaaattttggtattatttttagttttattttaaattagggattagaatatattgttttatgtagagtgttatattgaattataagttattaagtgattaaatgtttggatagagaattggggatgattttagcgttagaagggtagggaggtggtggggataatttaattaagtttaagttttagcgttttagaaggtaataggtttaagaggtagaggagggatttgggggaggggcgagaaagagcgtttagaaagcgagaattgattttagagaaagagtataggattgggggaggggttttttggttttcgtttttgttttgtcggagattgggatatttttttttttttttgggtttgtgttttcgtcgttatattttagtttggagggtatggtttagcggttgtataggtttttcggtttttgtagagttcgggagttattttattttggtaaaggtgagttttggttaggtttgttttgtttcgggagtagatttttttttaggtttttcgtttgtttttcggggtttgcgtttttcgggttgggtttggggaggttttttcgggtgatgtgttggggtttcggggattggtttttttcggttttttttaggtttggcggaggttaagggtaggtcgcgggatcgggtagtcgtttttatttagtcgtttcgttttattcgtcgtttgcgttcgggttttgttttgttggtaaataattttggtttttcgggtaacgtcgtagggtggggggttacgtgttttcggcgtgatcggaatcggtttgggtcgggtggggtcgggtggggtcgggtgggggtcgttgggttaggagggcggaggtcgtgaattttaggtcggtggattgcgagtttggagtggattgtttggtttggaggcgatagggattcgcggtttttttttttttttttttttttagcgttatcgtttttgtttttttttgggggagagtgtttgggagagggagagttttggtcggggtatggaggagcggggagtagtattattagttttaaaattcgttttttattttgggttaggttttgatttttttagtgtttttggttttaaaatgaggttgtgggattgatggattttcggaattttaaattttgagtggatgtttttagggtatttgagttgcggggagtagggtttttatttttagtatagtttttttagcgttagttttttgatttttttttatattagttttttatttcggggttatattgggaattttattaatagtatttgtattttttttgatgtttttagttataattttttttatttttagttatttgagttattttcgttgtatttgttttttattatttttgggttttttgtttattgttgttttcgttttttttttcgatattaatttgttttttttttattttggtttattatttcggtatttttaaaaggattttttttgttcgagttttattttttttttatttgatgaaatttgaagttaaattagtttatttatatacgggtattgaagaagttttggttagttatatattttggtgtaatagaaatacgaggtttttaattttagttagatttttagttttgtatttttatttttaatcgattattgggtttttttttttttttttttttttttttttttttttttaaggggagatagggtttcgtttttttatttaggttggagtgtagtggtgtaattatagtttattgtagtttggatttttttagtttagttttttttgtagttgggattataggcgtgtattattatgtttggttaatttttattattttttgtagaatggggttttgttatgttgttgagggtggttttgaagttttgggtttaagtgattttttcgttttagttttttaaagtgttgagattatagatatgagttatttcgtttagttttttttttttttttaatggttattttaaaacgttgttttgtttgcgaaattttttattttttttttttttatttttttttttttttttttttagaagatatttttattgttttttttagagagaaaatagaagttattatatggaaatttttttagttttttgttattagatttgtaaatttgtttgtttatatttttttgtttttttttttttttttagttttaatgttttttgattttttttaagg

SEQ ID NO: 538 - DNA, 3001 bp, homo sapiens
ggtaaaattattatatttaatttgtttttataatttattgtttttttttgagtatagggattatttgttatatggagggaatattagttttttttagtatttattatatagggatgggtggtgggggaaataggtgtttggggatttgggttaattgtgtttttatatttatattttaggttttgaattttgtttattatttttagtttaggattgaggtagtagttatgattttttttgtttagtttattttattatttttaggtttggtagttatttaattataaattgatttgataagatttaggtgtaggtatttattaagttgttaagttgaataggtgagtggtttgtttatttaaatataatagttgtattttagtggtttgttaggagttaggaagtaaatattgttaattgtttttaagaagttgttagaagggtaggtgtttattttttaagatttattattaaattaattggaaagaaggaaatgtggataggagaagttaaagtagggtttttgttttttaagggtgtttattatttattatagggttagattattttattttatttataatttaaatttaagtttatagtatatgtagtaaaatataattatttatatattatttgttggtatatattaagatatatatatttgaattggttttttaaaattgtattagttaattttatttgttgttattttgttttttttaatttatatttttattaggtttttaggataaaaatgttttgaagaattaataggagatggtggttggtttgagaatgaaaaaattttggtattatttttagttttattttaaattagggattagaatatattgttttatgtagagtgttatattgaattataagttattaagtgattaaatgtttggatagagaattggggatgattttagtgttagaagggtagggaggtggtggggataatttaattaagtttaagttttagtgttttagaaggtaataggtttaagaggtagaggagggatttgggggaggggtgagaaagagtgtttagaaagtgagaattgattttagagaaagagtataggattgggggaggggttttttggtttttgtttttgttttgttggagattgggatatttttttttttttttgggtttgtgtttttgttgttatattttagtttggagggtatggtttagtggttgtataggttttttggtttttgtagagtttgggagttattttattttggtaaaggtgagttttggttaggtttgttttgttttgggagtagatttttttttaggttttttgtttgttttttggggtttgtgttttttgggttgggtttggggaggtttttttgggtgatgtgttggggttttggggattggttttttttggttttttttaggtttggtggaggttaagggtaggttgtgggattgggtagttgtttttatttagttgttttgttttatttgttgtttgtgtttgggttttgttttgttggtaaataattttggttttttgggtaatgttgtagggtggggggttatgtgtttttggtgtgattggaattggtttgggttgggtggggttgggtggggttgggtgggggttgttgggttaggagggtggaggttgtgaattttaggttggtggattgtgagtttggagtggattgtttggtttggaggtgatagggatttgtggtttttttttttttttttttttttagtgttattgtttttgtttttttttgggggagagtgtttgggagagggagagttttggttggggtatggaggagtggggagtagtattattagttttaaaatttgttttttattttgggttaggttttgatttttttagtgtttttggttttaaaatgaggttgtgggattgatggatttttggaattttaaattttgagtggatgtttttagggtatttgagttgtggggagtagggtttttatttttagtatagtttttttagtgttagttttttgatttttttttatattagttttttattttggggttatattgggaattttattaatagtatttgtattttttttgatgtttttagttataattttttttatttttagttatttgagttatttttgttgtatttgttttttattatttttgggttttttgtttattgttgtttttgtttttttttttgatattaatttgttttttttttattttggtttattattttggtatttttaaaaggattttttttgtttgagttttattttttttttatttgatgaaatttgaagttaaattagtttatttatatatgggtattgaagaagttttggttagttatatattttggtgtaatagaaatatgaggtttttaattttagttagatttttagttttgtatttttatttttaattgattattgggtttttttttttttttttttttttttttttttttttttaaggggagatagggttttgtttttttatttaggttggagtgtagtggtgtaattatagtttattgtagtttggatttttttagtttagttttttttgtagttgggattataggtgtgtattattatgtttggttaatttttattattttttgtagaatggggttttgttatgttgttgagggtggttttgaagttttgggtttaagtgatttttttgttttagttttttaaagtgttgagattatagatatgagttattttgtttagttttttttttttttttaatggttattttaaaatgttgttttgtttgtgaaattttttattttttttttttttatttttttttttttttttttttagaagatatttttattgttttttttagagagaaaatagaagttattatatggaaatttttttagttttttgttattagatttgtaaatttgtttgtttatatttttttgtttttttttttttttttagttttaatgttttttgattttttttaagg

SEQ ID NO: 539 - DNA, 3001 bp, homo sapiens
ttttggagagaattagaagatattagaattggagggagggaggaaagtaaggaagtgtaggtaggtaagtttgtaggtttgatggtagaaggttgaggaagtttttatatgatggtttttattttttttttgaagagggtagtaaaggtattttttaagagggaggagggagggaggtgggagagggagaggtgggaggtttcgtaagtaaaataacgttttgaaatagttattgagaagaaaggagaggttgggcgaggtggtttatgtttgtaattttagtattttgggaggttgaggcgggaggattatttgagtttaagattttaagattatttttagtaatatggtagaattttattttataaaaaataataaaaattagttaagtatggtggtgtacgtttgtagttttagttataagggaggttgagttggggaggtttaggttgtagtgagttgtgattgtattattgtattttagtttgggtgaaggggcgagattttgtttttttttaaaaaaggaagaaaaagaagaaaggagggagagagaatttagtggtcggttggggatggaagtgtagggttgagagtttaattgaggttagagatttcgtgtttttgttatattaaggtgtgtggttggttaagatttttttaatattcgtgtgtaggtggattggtttggttttaggttttattagatggaaggagagtaggattcgggtagggaggatttttttgagaatgtcgaggtaatgggttaggatagggaagaagtagattgatatcgagggggaaagcggagatagtaatggataggaaatttaaagatggtgaaaaatagatatagcggaagtgatttaagtggttggaagtggaagagattgtggttggggatattaaaggaggtgtagatgttgttgataaggtttttagtgtggtttcggagtgggaggttgatgtgaaaagaggttagggaattggcgttgaaagggttgtattgaggatgggggttttgtttttcgtaatttagatattttagaagtatttatttagagtttagggtttcgagaatttattagttttatagttttattttaaaattagggatattgagagggttagggtttgatttaaggtgagaaacggattttgagattagtggtgttgtttttcgtttttttatgtttcggttagggtttttttttttttagatatttttttttagagagaaatagaggcggtgacgttaggaagaggaggagagaaggaggtcgcgggtttttgtcgtttttaggttaggtaatttattttaggttcgtaatttatcgatttggagtttacggttttcgtttttttggtttagcggtttttattcgattttattcgattttattcgatttaggtcggtttcggttacgtcggaagtacgtggttttttattttgcggcgttgttcgggagattagggttgtttattagtaggatagagttcgggcgtaggcggcggatggagcggaacggttaggtgagagcggttgttcgatttcgcggtttgtttttggttttcgttaggtttggaaggggtcgggggaggttagttttcgagattttagtatattattcgggagggtttttttagatttagttcgggggacgtaaatttcgggagataggcgaggagtttggagaaaagtttgttttcgaggtaaagtaagtttggttagagtttatttttattaaaatagggtgattttcgggttttgtagaaatcgagggatttatgtaatcgttgggttatgttttttaggttgggatgtagcgacggggatatagatttagggagagaaaaggatgttttagttttcggtagggtagagacgagaattagagggttttttttttagttttgtgttttttttttgaagttaattttcgttttttaaacgttttttttcgttttttttttagattttttttttgttttttaagtttgttgttttttagggcgttggaatttggatttaattgagttatttttattatttttttgtttttttgacgttggaattatttttagttttttatttaaatatttgattatttggtggtttgtggtttagtgtggtattttgtataggatagtgtattttaatttttagtttggggtagaattgggaatggtattagagtttttttatttttaggttaattattattttttgttggttttttagagtatttttattttgaaagtttggtgggggtgtgggttggggggggcgggatggtaacggataggattaattgatatagttttaaaagattaatttaaatgtatgtattttggtatatattagtagatggtatgtaggtggttatattttattgtatatattgtaggtttagatttgggttgtgagtgaaatagggtggtttgattttgtggtgggtggtgggtatttttagaaagtaggagttttgttttagttttttttatttatatttttttttttttagttgatttggtggtgaattttaaggaatgggtatttgtttttttggtaattttttggaaatagttggtagtgtttgttttttgatttttagtaggtcgttggggtgtagttattgtgtttaagtaaataggttattcgtttatttagtttggtagtttgatagatgtttacgtttagattttgttaaatcggtttgtggttgagtggttgttaggtttagaggtggtgaagtgaattgagtagggagaattatggttgttgttttaattttggattgagggtggtgggtagagtttaggatttgaggtgtgaatataaaggtatagttggtttagatttttaaatatttgttttttttatcgtttatttttgtgtgatgggtgttggggagagttggtgtttttttcgtgtaatagatggtttttgtgttcgggaggaggtagtgggttatgaaagtaggttggatataatggttttatt

SEQ ID NO: 540 - DNA, 3001 bp, homo sapiens
ttttggagagaattagaagatattagaattggagggagggaggaaagtaaggaagtgtaggtaggtaagtttgtaggtttgatggtagaaggttgaggaagtttttatatgatggtttttattttttttttgaagagggtagtaaaggtattttttaagagggaggagggagggaggtgggagagggagaggtgggaggttttgtaagtaaaataatgttttgaaatagttattgagaagaaaggagaggttgggtgaggtggtttatgtttgtaattttagtattttgggaggttgaggtgggaggattatttgagtttaagattttaagattatttttagtaatatggtagaattttattttataaaaaataataaaaattagttaagtatggtggtgtatgtttgtagttttagttataagggaggttgagttggggaggtttaggttgtagtgagttgtgattgtattattgtattttagtttgggtgaaggggtgagattttgtttttttttaaaaaaggaagaaaaagaagaaaggagggagagagaatttagtggttggttggggatggaagtgtagggttgagagtttaattgaggttagagattttgtgtttttgttatattaaggtgtgtggttggttaagatttttttaatatttgtgtgtaggtggattggtttggttttaggttttattagatggaaggagagtaggatttgggtagggaggatttttttgagaatgttgaggtaatgggttaggatagggaagaagtagattgatattgagggggaaagtggagatagtaatggataggaaatttaaagatggtgaaaaatagatatagtggaagtgatttaagtggttggaagtggaagagattgtggttggggatattaaaggaggtgtagatgttgttgataaggtttttagtgtggttttggagtgggaggttgatgtgaaaagaggttagggaattggtgttgaaagggttgtattgaggatgggggttttgttttttgtaatttagatattttagaagtatttatttagagtttagggttttgagaatttattagttttatagttttattttaaaattagggatattgagagggttagggtttgatttaaggtgagaaatggattttgagattagtggtgttgttttttgtttttttatgttttggttagggtttttttttttttagatatttttttttagagagaaatagaggtggtgatgttaggaagaggaggagagaaggaggttgtgggtttttgttgtttttaggttaggtaatttattttaggtttgtaatttattgatttggagtttatggtttttgtttttttggtttagtggtttttatttgattttatttgattttatttgatttaggttggttttggttatgttggaagtatgtggttttttattttgtggtgttgtttgggagattagggttgtttattagtaggatagagtttgggtgtaggtggtggatggagtggaatggttaggtgagagtggttgtttgattttgtggtttgtttttggtttttgttaggtttggaaggggttgggggaggttagtttttgagattttagtatattatttgggagggtttttttagatttagtttgggggatgtaaattttgggagataggtgaggagtttggagaaaagtttgtttttgaggtaaagtaagtttggttagagtttatttttattaaaatagggtgatttttgggttttgtagaaattgagggatttatgtaattgttgggttatgttttttaggttgggatgtagtgatggggatatagatttagggagagaaaaggatgttttagtttttggtagggtagagatgagaattagagggttttttttttagttttgtgttttttttttgaagttaatttttgttttttaaatgtttttttttgttttttttttagattttttttttgttttttaagtttgttgttttttagggtgttggaatttggatttaattgagttatttttattatttttttgtttttttgatgttggaattatttttagttttttatttaaatatttgattatttggtggtttgtggtttagtgtggtattttgtataggatagtgtattttaatttttagtttggggtagaattgggaatggtattagagtttttttatttttaggttaattattattttttgttggttttttagagtatttttattttgaaagtttggtgggggtgtgggttggggggggtgggatggtaatggataggattaattgatatagttttaaaagattaatttaaatgtatgtattttggtatatattagtagatggtatgtaggtggttatattttattgtatatattgtaggtttagatttgggttgtgagtgaaatagggtggtttgattttgtggtgggtggtgggtatttttagaaagtaggagttttgttttagttttttttatttatatttttttttttttagttgatttggtggtgaattttaaggaatgggtatttgtttttttggtaattttttggaaatagttggtagtgtttgttttttgatttttagtaggttgttggggtgtagttattgtgtttaagtaaataggttatttgtttatttagtttggtagtttgatagatgtttatgtttagattttgttaaattggtttgtggttgagtggttgttaggtttagaggtggtgaagtgaattgagtagggagaattatggttgttgttttaattttggattgagggtggtgggtagagtttaggatttgaggtgtgaatataaaggtatagttggtttagatttttaaatatttgttttttttattgtttatttttgtgtgatgggtgttggggagagttggtgttttttttgtgtaatagatggtttttgtgtttgggaggaggtagtgggttatgaaagtaggttggatataatggttttatt

SEQ ID NO: 541 - DNA, 50 bp, homo sapiens
aactgcacctctgtcaaggtaggagtgtccgggatgccggagcggacacg

SEQ ID NO: 542 - DNA, 50 bp, homo sapiens
aattgtatttttgttaaggtaggagtgttcgggatgtcggagcggatacg

SEQ ID NO: 543 - DNA, 50 bp, homo sapiens
aattgtatttttgttaaggtaggagtgtttgggatgttggagtggatatg

SEQ ID NO: 544 - DNA, 50 bp, homo sapiens
cgtgttcgtttcggtatttcggatatttttattttgatagaggtgtagtt

SEQ ID NO: 545 - DNA, 50 bp, homo sapiens
tgtgtttgttttggtattttggatatttttattttgatagaggtgtagtt

SEQ ID NO: 546 - DNA, 3001 bp, homo sapiens
gaagttcacaagtttttgattattcaaaaatcataaaaggccaagaggtcttgaagtaagtaaaaataagttcaggtttaccaacaaactctacagccttaagttactttctgccggccaaggttttctcatcagaaaatgaggacaagtgtttgacctagaatttgggaaatctgactagtgctgtactgtgctaaaattcactcttcttatgtataacgttgttttattattttattagttgatggcctctcaaccgtacccagtaataagagaaactttaccctctaattagaaaataatggatatctacttttggcctgctgtggcagaggaaaaggcagttaccctaggactggttttgaaataatctttctaaaaacaaagaaaaaactacgttaattttggattcttcccgataacacatatatttgatccaatagaaaaatgatgtctaaattacttgtcagataaattgattatcttttccagattattacattactatttaaggaagaaataacttggccatagtattttcactgtcacacacgatcacacacagctcatttgctcttggcacccttacagacactgaaatacaagcacaaagaaagcacgtttatataacacagatcaccagttactcaattacggccacacacaaaaaagcagatatacatacagatacccttcataagcaaaccacaatagagatctgtgtaaaatcgtcttactctgttagacgattctacacagttataaaatcccattactacgcagcttaaagtacaaatcacctcacaccccacagcaggaagaatcacacacaggcagaaacacaaccatacacacccggccacggaaagactctcagtccacctggcatctcccattgtcacacacaccccaagggcctgggagggcacacacagggtcctctgcaaatccgaggttccggcgggtccccgcaccggccccagctcctcccccgcacctgcctggccggcgggtcccaccctctctcctgccaggggtagaccctgggaccactcagctcgctctcgcaggccctgagcgtctgacgcctgcgcactgagcgcgggcgggcgggcactcccagaaacctccggggcgctgcaggcgggacaagcaggttccacaggccgagcccacgagcccctcgaggggtgagcggcccgggcctcctggcgttctggccggctagccaagcgctggactacatttcccagaggcacggcgtccggagcgctggactacatttcccagaggcaccgctcccggagcgtagcttcatttccgttagtttgcgagatttggaggcctcgcgtggggagagggccgcgtctgtggaggagcttggctccgcacctgctgggctggcgaacccgaaattgggcttggaacccgggagccagatcttggaccctgaactgcacctctgtcaaggtaggagtgtccgggatgccggagcggacacgcgcggagaaagcgtcgctggggttactcgtgtggccgtgtctccggttttgtgtgcaggctacagcctgcctggtattggcgactgcctgtgcatacacgactggacgtgtgtggctgtggttttgtgtatgagcatttgtatgagtgtgagttgtgactctgagggtgtttgtgactgtttgcttacctggctgggatatacttatgtgactgtgattttatgtgtgccgcgtgtataattggggtttgcctgtgactatgaagtgtgtgacagttgtgacaagagtgtttggatgttcttgtgtcactttgaggttgtgtgtaaacctgatatcgtgggatggatttgccagtaaatttaaggtgtgtgacagtgttgctgtgacacggtgtttattaccgcgtgtttccctgatttcgtactgggttgggtgactgtctgattgtgtgtgactgtggggttgtgtgtgctgttttcatgactgtgtaaagagactaaaattgcagctttgaaagggtgtttttggcggtatgtgtctctgacaaggtgcttggatgtaattatatgccttgtacttaatgggattttgtttgagacaaggtggtctaacaatgtagcataattgggtgattgtgcctctagctgtgtaactgtggaaatgtgattatgtgtgactttatgtggccatttgtatattctgtgaccttatgggggtttagtccagtacagaagtaaatttctttttggtatttctggggttcatttggggctgaggtctgcctatggattgtgagtcccatgtggctctgtgctcctcccatgtggctctgaggacttaaggactttttgatttgaccacagtggctgccctttcatccatggcctgtattgcttcatttctgtatccatcctcggttcaccttgggaaatgtagttacttacgagttcacgacttcttccctgcgtcctcttgccttatagccttaaggggattgggtgcagggaagtggcaagaagtaaggaagtcagacatttggacacctgagtgatgaataggagttatttgcaagttacagacctggtcttaggatgagaattttagggctgataataccttcaagacagccactggatgctgtgcgcggtggctcacatctgtaatcccagcgctttgggaggcagaggcgggtggattacctgaggtcatggtttcaccatgacctctactaaaaatacaaaattagctgggcgtggtggcgcatgcctgtaatcccagctacttaggaggctgaggcaggagaattgcttgaacccgggaggcggaggttgcagtgagccaagatcaagccactgcactccagcctgggcaacaagagtgaaactcattctctaaataaataaataaataggccactggaaatataatgggactccaggagtgggaatagtttcagagggagtgctttaggagacagccacccagttctgaacctgaag

SEQ ID NO: 547 - DNA, 3001 bp, homo sapiens
gaagtttataagtttttgattatttaaaaattataaaaggttaagaggttttgaagtaagtaaaaataagtttaggtttattaataaattttatagttttaagttattttttgtcggttaaggtttttttattagaaaatgaggataagtgtttgatttagaatttgggaaatttgattagtgttgtattgtgttaaaatttattttttttatgtataacgttgttttattattttattagttgatggttttttaatcgtatttagtaataagagaaattttattttttaattagaaaataatggatatttatttttggtttgttgtggtagaggaaaaggtagttattttaggattggttttgaaataatttttttaaaaataaagaaaaaattacgttaattttggatttttttcgataatatatatatttgatttaatagaaaaatgatgtttaaattatttgttagataaattgattattttttttagattattatattattatttaaggaagaaataatttggttatagtatttttattgttatatacgattatatatagtttatttgtttttggtatttttatagatattgaaatataagtataaagaaagtacgtttatataatatagattattagttatttaattacggttatatataaaaaagtagatatatatatagatattttttataagtaaattataatagagatttgtgtaaaatcgttttattttgttagacgattttatatagttataaaattttattattacgtagtttaaagtataaattattttatattttatagtaggaagaattatatataggtagaaatataattatatatattcggttacggaaagatttttagtttatttggtattttttattgttatatatattttaagggtttgggagggtatatatagggttttttgtaaattcgaggtttcggcgggttttcgtatcggttttagtttttttttcgtatttgtttggtcggcgggttttatttttttttttgttaggggtagattttgggattatttagttcgttttcgtaggttttgagcgtttgacgtttgcgtattgagcgcgggcgggcgggtatttttagaaattttcggggcgttgtaggcgggataagtaggttttataggtcgagtttacgagtttttcgaggggtgagcggttcgggttttttggcgttttggtcggttagttaagcgttggattatattttttagaggtacggcgttcggagcgttggattatattttttagaggtatcgttttcggagcgtagttttattttcgttagtttgcgagatttggaggtttcgcgtggggagagggtcgcgtttgtggaggagtttggtttcgtatttgttgggttggcgaattcgaaattgggtttggaattcgggagttagattttggattttgaattgtatttttgttaaggtaggagtgttcgggatgtcggagcggatacgcgcggagaaagcgtcgttggggttattcgtgtggtcgtgttttcggttttgtgtgtaggttatagtttgtttggtattggcgattgtttgtgtatatacgattggacgtgtgtggttgtggttttgtgtatgagtatttgtatgagtgtgagttgtgattttgagggtgtttgtgattgtttgtttatttggttgggatatatttatgtgattgtgattttatgtgtgtcgcgtgtataattggggtttgtttgtgattatgaagtgtgtgatagttgtgataagagtgtttggatgtttttgtgttattttgaggttgtgtgtaaatttgatatcgtgggatggatttgttagtaaatttaaggtgtgtgatagtgttgttgtgatacggtgtttattatcgcgtgtttttttgatttcgtattgggttgggtgattgtttgattgtgtgtgattgtggggttgtgtgtgttgtttttatgattgtgtaaagagattaaaattgtagttttgaaagggtgtttttggcggtatgtgtttttgataaggtgtttggatgtaattatatgttttgtatttaatgggattttgtttgagataaggtggtttaataatgtagtataattgggtgattgtgtttttagttgtgtaattgtggaaatgtgattatgtgtgattttatgtggttatttgtatattttgtgattttatgggggtttagtttagtatagaagtaaatttttttttggtatttttggggtttatttggggttgaggtttgtttatggattgtgagttttatgtggttttgtgttttttttatgtggttttgaggatttaaggattttttgatttgattatagtggttgtttttttatttatggtttgtattgttttatttttgtatttattttcggtttattttgggaaatgtagttatttacgagtttacgattttttttttgcgtttttttgttttatagttttaaggggattgggtgtagggaagtggtaagaagtaaggaagttagatatttggatatttgagtgatgaataggagttatttgtaagttatagatttggttttaggatgagaattttagggttgataatatttttaagatagttattggatgttgtgcgcggtggtttatatttgtaattttagcgttttgggaggtagaggcgggtggattatttgaggttatggttttattatgatttttattaaaaatataaaattagttgggcgtggtggcgtatgtttgtaattttagttatttaggaggttgaggtaggagaattgtttgaattcgggaggcggaggttgtagtgagttaagattaagttattgtattttagtttgggtaataagagtgaaatttattttttaaataaataaataaataggttattggaaatataatgggattttaggagtgggaatagttttagagggagtgttttaggagatagttatttagttttgaatttgaag

SEQ ID NO: 548 - DNA, 3001 bp, homo sapiens
gaagtttataagtttttgattatttaaaaattataaaaggttaagaggttttgaagtaagtaaaaataagtttaggtttattaataaattttatagttttaagttattttttgttggttaaggtttttttattagaaaatgaggataagtgtttgatttagaatttgggaaatttgattagtgttgtattgtgttaaaatttattttttttatgtataatgttgttttattattttattagttgatggttttttaattgtatttagtaataagagaaattttattttttaattagaaaataatggatatttatttttggtttgttgtggtagaggaaaaggtagttattttaggattggttttgaaataatttttttaaaaataaagaaaaaattatgttaattttggattttttttgataatatatatatttgatttaatagaaaaatgatgtttaaattatttgttagataaattgattattttttttagattattatattattatttaaggaagaaataatttggttatagtatttttattgttatatatgattatatatagtttatttgtttttggtatttttatagatattgaaatataagtataaagaaagtatgtttatataatatagattattagttatttaattatggttatatataaaaaagtagatatatatatagatattttttataagtaaattataatagagatttgtgtaaaattgttttattttgttagatgattttatatagttataaaattttattattatgtagtttaaagtataaattattttatattttatagtaggaagaattatatataggtagaaatataattatatatatttggttatggaaagatttttagtttatttggtattttttattgttatatatattttaagggtttgggagggtatatatagggttttttgtaaatttgaggttttggtgggtttttgtattggttttagttttttttttgtatttgtttggttggtgggttttatttttttttttgttaggggtagattttgggattatttagtttgtttttgtaggttttgagtgtttgatgtttgtgtattgagtgtgggtgggtgggtatttttagaaatttttggggtgttgtaggtgggataagtaggttttataggttgagtttatgagttttttgaggggtgagtggtttgggttttttggtgttttggttggttagttaagtgttggattatattttttagaggtatggtgtttggagtgttggattatattttttagaggtattgtttttggagtgtagttttatttttgttagtttgtgagatttggaggttttgtgtggggagagggttgtgtttgtggaggagtttggttttgtatttgttgggttggtgaatttgaaattgggtttggaatttgggagttagattttggattttgaattgtatttttgttaaggtaggagtgtttgggatgttggagtggatatgtgtggagaaagtgttgttggggttatttgtgtggttgtgtttttggttttgtgtgtaggttatagtttgtttggtattggtgattgtttgtgtatatatgattggatgtgtgtggttgtggttttgtgtatgagtatttgtatgagtgtgagttgtgattttgagggtgtttgtgattgtttgtttatttggttgggatatatttatgtgattgtgattttatgtgtgttgtgtgtataattggggtttgtttgtgattatgaagtgtgtgatagttgtgataagagtgtttggatgtttttgtgttattttgaggttgtgtgtaaatttgatattgtgggatggatttgttagtaaatttaaggtgtgtgatagtgttgttgtgatatggtgtttattattgtgtgtttttttgattttgtattgggttgggtgattgtttgattgtgtgtgattgtggggttgtgtgtgttgtttttatgattgtgtaaagagattaaaattgtagttttgaaagggtgtttttggtggtatgtgtttttgataaggtgtttggatgtaattatatgttttgtatttaatgggattttgtttgagataaggtggtttaataatgtagtataattgggtgattgtgtttttagttgtgtaattgtggaaatgtgattatgtgtgattttatgtggttatttgtatattttgtgattttatgggggtttagtttagtatagaagtaaatttttttttggtatttttggggtttatttggggttgaggtttgtttatggattgtgagttttatgtggttttgtgttttttttatgtggttttgaggatttaaggattttttgatttgattatagtggttgtttttttatttatggtttgtattgttttatttttgtatttatttttggtttattttgggaaatgtagttatttatgagtttatgattttttttttgtgtttttttgttttatagttttaaggggattgggtgtagggaagtggtaagaagtaaggaagttagatatttggatatttgagtgatgaataggagttatttgtaagttatagatttggttttaggatgagaattttagggttgataatatttttaagatagttattggatgttgtgtgtggtggtttatatttgtaattttagtgttttgggaggtagaggtgggtggattatttgaggttatggttttattatgatttttattaaaaatataaaattagttgggtgtggtggtgtatgtttgtaattttagttatttaggaggttgaggtaggagaattgtttgaatttgggaggtggaggttgtagtgagttaagattaagttattgtattttagtttgggtaataagagtgaaatttattttttaaataaataaataaataggttattggaaatataatgggattttaggagtgggaatagttttagagggagtgttttaggagatagttatttagttttgaatttgaag

SEQ ID NO: 549 - DNA, 3001 bp, homo sapiens
ttttaggtttagaattgggtggttgttttttaaagtattttttttgaaattatttttatttttggagttttattatatttttagtggtttatttatttatttatttagagaatgagttttatttttgttgtttaggttggagtgtagtggtttgattttggtttattgtaattttcgtttttcgggtttaagtaatttttttgttttagttttttaagtagttgggattataggtatgcgttattacgtttagttaattttgtatttttagtagaggttatggtgaaattatgattttaggtaatttattcgtttttgttttttaaagcgttgggattatagatgtgagttatcgcgtatagtatttagtggttgttttgaaggtattattagttttaaaatttttattttaagattaggtttgtaatttgtaaataatttttatttattatttaggtgtttaaatgtttgatttttttattttttgttatttttttgtatttaatttttttaaggttataaggtaagaggacgtagggaagaagtcgtgaattcgtaagtaattatattttttaaggtgaatcgaggatggatatagaaatgaagtaatataggttatggatgaaagggtagttattgtggttaaattaaaaagtttttaagtttttagagttatatgggaggagtatagagttatatgggatttataatttataggtagattttagttttaaatgaattttagaaatattaaaaagaaatttatttttgtattggattaaatttttataaggttatagaatatataaatggttatataaagttatatataattatatttttatagttatatagttagaggtataattatttaattatgttatattgttagattattttgttttaaataaaattttattaagtataaggtatataattatatttaagtattttgttagagatatatatcgttaaaaatatttttttaaagttgtaattttagtttttttatatagttatgaaaatagtatatataattttatagttatatataattagatagttatttaatttagtacgaaattagggaaatacgcggtaataaatatcgtgttatagtaatattgttatatattttaaatttattggtaaatttattttacgatattaggtttatatataattttaaagtgatataagaatatttaaatatttttgttataattgttatatattttatagttataggtaaattttaattatatacgcggtatatataaaattatagttatataagtatattttagttaggtaagtaaatagttataaatatttttagagttataatttatatttatataaatgtttatatataaaattatagttatatacgtttagtcgtgtatgtataggtagtcgttaatattaggtaggttgtagtttgtatataaaatcggagatacggttatacgagtaattttagcgacgtttttttcgcgcgtgttcgtttcggtatttcggatatttttattttgatagaggtgtagtttagggtttaagatttggttttcgggttttaagtttaatttcgggttcgttagtttagtaggtgcggagttaagtttttttatagacgcggttttttttttacgcgaggtttttaaatttcgtaaattaacggaaatgaagttacgtttcgggagcggtgtttttgggaaatgtagtttagcgtttcggacgtcgtgtttttgggaaatgtagtttagcgtttggttagtcggttagaacgttaggaggttcgggtcgtttatttttcgaggggttcgtgggttcggtttgtggaatttgtttgtttcgtttgtagcgtttcggaggtttttgggagtgttcgttcgttcgcgtttagtgcgtaggcgttagacgtttagggtttgcgagagcgagttgagtggttttagggtttatttttggtaggagagagggtgggattcgtcggttaggtaggtgcgggggaggagttggggtcggtgcggggattcgtcggaatttcggatttgtagaggattttgtgtgtgtttttttaggtttttggggtgtgtgtgataatgggagatgttaggtggattgagagttttttcgtggtcgggtgtgtatggttgtgtttttgtttgtgtgtgattttttttgttgtggggtgtgaggtgatttgtattttaagttgcgtagtaatgggattttataattgtgtagaatcgtttaatagagtaagacgattttatatagatttttattgtggtttgtttatgaagggtatttgtatgtatatttgtttttttgtgtgtggtcgtaattgagtaattggtgatttgtgttatataaacgtgttttttttgtgtttgtattttagtgtttgtaagggtgttaagagtaaatgagttgtgtgtgatcgtgtgtgatagtgaaaatattatggttaagttattttttttttaaatagtaatgtaataatttggaaaagataattaatttatttgataagtaatttagatattatttttttattggattaaatatatgtgttatcgggaagaatttaaaattaacgtagttttttttttgtttttagaaagattattttaaaattagttttagggtaattgtttttttttttgttatagtaggttaaaagtagatatttattattttttaattagagggtaaagttttttttattattgggtacggttgagaggttattaattaataaaataataaaataacgttatatataagaagagtgaattttagtatagtatagtattagttagattttttaaattttaggttaaatatttgtttttattttttgatgagaaaattttggtcggtagaaagtaatttaaggttgtagagtttgttggtaaatttgaatttatttttatttattttaagattttttggttttttatgatttttgaataattaaaaatttgtgaatttt

SEQ ID NO: 550 - DNA, 3001 bp, homo sapiens
ttttaggtttagaattgggtggttgttttttaaagtattttttttgaaattatttttatttttggagttttattatatttttagtggtttatttatttatttatttagagaatgagttttatttttgttgtttaggttggagtgtagtggtttgattttggtttattgtaatttttgttttttgggtttaagtaatttttttgttttagttttttaagtagttgggattataggtatgtgttattatgtttagttaattttgtatttttagtagaggttatggtgaaattatgattttaggtaatttatttgtttttgttttttaaagtgttgggattatagatgtgagttattgtgtatagtatttagtggttgttttgaaggtattattagttttaaaatttttattttaagattaggtttgtaatttgtaaataatttttatttattatttaggtgtttaaatgtttgatttttttattttttgttatttttttgtatttaatttttttaaggttataaggtaagaggatgtagggaagaagttgtgaatttgtaagtaattatattttttaaggtgaattgaggatggatatagaaatgaagtaatataggttatggatgaaagggtagttattgtggttaaattaaaaagtttttaagtttttagagttatatgggaggagtatagagttatatgggatttataatttataggtagattttagttttaaatgaattttagaaatattaaaaagaaatttatttttgtattggattaaatttttataaggttatagaatatataaatggttatataaagttatatataattatatttttatagttatatagttagaggtataattatttaattatgttatattgttagattattttgttttaaataaaattttattaagtataaggtatataattatatttaagtattttgttagagatatatattgttaaaaatatttttttaaagttgtaattttagtttttttatatagttatgaaaatagtatatataattttatagttatatataattagatagttatttaatttagtatgaaattagggaaatatgtggtaataaatattgtgttatagtaatattgttatatattttaaatttattggtaaatttattttatgatattaggtttatatataattttaaagtgatataagaatatttaaatatttttgttataattgttatatattttatagttataggtaaattttaattatatatgtggtatatataaaattatagttatataagtatattttagttaggtaagtaaatagttataaatatttttagagttataatttatatttatataaatgtttatatataaaattatagttatatatgtttagttgtgtatgtataggtagttgttaatattaggtaggttgtagtttgtatataaaattggagatatggttatatgagtaattttagtgatgttttttttgtgtgtgtttgttttggtattttggatatttttattttgatagaggtgtagtttagggtttaagatttggtttttgggttttaagtttaattttgggtttgttagtttagtaggtgtggagttaagtttttttatagatgtggttttttttttatgtgaggtttttaaattttgtaaattaatggaaatgaagttatgttttgggagtggtgtttttgggaaatgtagtttagtgttttggatgttgtgtttttgggaaatgtagtttagtgtttggttagttggttagaatgttaggaggtttgggttgtttattttttgaggggtttgtgggtttggtttgtggaatttgtttgttttgtttgtagtgttttggaggtttttgggagtgtttgtttgtttgtgtttagtgtgtaggtgttagatgtttagggtttgtgagagtgagttgagtggttttagggtttatttttggtaggagagagggtgggatttgttggttaggtaggtgtgggggaggagttggggttggtgtggggatttgttggaattttggatttgtagaggattttgtgtgtgtttttttaggtttttggggtgtgtgtgataatgggagatgttaggtggattgagagtttttttgtggttgggtgtgtatggttgtgtttttgtttgtgtgtgattttttttgttgtggggtgtgaggtgatttgtattttaagttgtgtagtaatgggattttataattgtgtagaattgtttaatagagtaagatgattttatatagatttttattgtggtttgtttatgaagggtatttgtatgtatatttgtttttttgtgtgtggttgtaattgagtaattggtgatttgtgttatataaatgtgttttttttgtgtttgtattttagtgtttgtaagggtgttaagagtaaatgagttgtgtgtgattgtgtgtgatagtgaaaatattatggttaagttattttttttttaaatagtaatgtaataatttggaaaagataattaatttatttgataagtaatttagatattatttttttattggattaaatatatgtgttattgggaagaatttaaaattaatgtagttttttttttgtttttagaaagattattttaaaattagttttagggtaattgtttttttttttgttatagtaggttaaaagtagatatttattattttttaattagagggtaaagttttttttattattgggtatggttgagaggttattaattaataaaataataaaataatgttatatataagaagagtgaattttagtatagtatagtattagttagattttttaaattttaggttaaatatttgtttttattttttgatgagaaaattttggttggtagaaagtaatttaaggttgtagagtttgttggtaaatttgaatttatttttatttattttaagattttttggttttttatgatttttgaataattaaaaatttgtgaatttt

1. A method for determining the prognosis of a subject with ovarian carcinoma using a biological sample comprising genomic tumor DNA isolated from the subject, comprising:
determining the methylation status of a CpG dinucleotide in a target sequence that is selected from the group consisting of the target sequences as referred to by gene name in Table 1 in a biological sample isolated from a subject, and
deducing from the determined methylation status of the target sequence the prognosis of the subject with ovarian carcinoma.

2. The method of claim 1, wherein the subject with ovarian carcinoma receives a platinum-based treatment.

3. The method according to claim 1, wherein the methylation status of at least 2, 5, 10, 15, or 25 CpG dinucleotides are determined.

4. The method according to claim 1, wherein the biological sample is selected from the group consisting of ovarian tumor tissue, lymph node metastasis tissue, blood, serum, plasma, peritoneal cavity fluid.

5. The method according to claim 1, further comprising isolating genomic DNA from the biological sample.

6. The method according to claim 1, wherein determining the methylation status comprises treating the genomic DNA or a fragment thereof with a chemical reagent or an enzyme containing solution, whereby the base pairing behavior of methylated cytosine bases and/or unmethylated cytosine bases of the nucleic acid are altered such that methylated cytosine bases become distinguishable from unmethylated cytosine bases.

7. The method according to claim 1, wherein determining the methylation status comprises amplifying the treated genomic DNA by means of methylation specific primers and/or blocking oligonucleotides.

8. The method according to claim 7, wherein determining the methylation status comprises determining the presence or absence of the amplified DNA by means of a real-time detection probe.

9. The method according to claim 1, wherein determining the methylation status comprises determining the methylation status of a CpG dinucleotide in at least two target sequences, in a biological sample isolated from a subject.

10. A nucleic acid for the detection of ovarian carcinoma, wherein the nucleic acid comprises at least 16 contiguous nucleotides of a sequence selected from the group consisting of the bisulfite sequences of Table 1, and sequences complementary thereto.

11. A nucleic acid for detecting ovarian cancer in a subject, comprising at least 50 contiguous nucleotides of a sequence selected from the group consisting of the bisulfite sequences as provided in Table 1, and sequences complementary thereto.

12. A kit for determining the prognosis of subjects with ovarian carcinoma comprising
(a) a bisulfite reagent for converting a nucleic acid, and
(b) a set of oligonucleotides comprising two oligonucleotides wherein the sequence of each of the two oligonucleotides is identical, is complementary, or hybridizes under stringent or highly stringent conditions to an at least 9 base long segment of a sequence selected from the bisulfite sequences of Table 1.

13. A kit for determining the prognosis of subjects with ovarian carcinoma comprising
(a) a methylation sensitive restriction enzyme reagent, and
(b) at least one set of oligonucleotides comprising one or a plurality of nucleic acids or peptide nucleic acids which are identical, are complementary, or hybridize under stringent or highly stringent conditions to an at least 9 base long segment of the genomic sequences as provided in Table 1.

14. (canceled)

15. The method of claim 9 wherein the two target sequences are selected from the group consisting of the target sequences as referred to by gene name in Table 1.

16. The method of claim 15 wherein the two target sequences are from different genes.

17. The method of claim 12 wherein the sequence of each of the two oligonucleotides is identical, is complementary, or hybridizes under stringent or highly stringent conditions to an at least 18 base long segment of the sequence selected from the bisulfite sequences of Table 1.

18. The method of claim 13 wherein the one or at least one of the plurality of nucleic acids or peptide nucleic acids is identical, is complementary, or hybridizes under stringent or highly stringent conditions to an at least 18 base long segment of the genomic sequences as provided in Table 1.
